(19) United States
(12) Patent Application Publication
(10) Pub. No.: US 2024/0190941 A1
(43) Pub. Date: Jun. 13, 2024

(54) PEPTIDE-MHC-IMMUNOGLOBULIN MULTIMERS AND METHODS OF USE THEREOF

(71) Applicant: REPERTOIRE IMMUNE MEDICINES, INC., Cambridge, MA (US)

(72) Inventors: Thomas J. MALIA, Cambridge, MA (US); Joanna F. SWAIN, Cambridge, MA (US); Andrew G. HAMEL, Cambridge, MA (US); Ellen M. WHITE, Cambridge, MA (US)

(21) Appl. No.: 18/554,625

(22) PCT Filed: Apr. 7, 2022
(86) PCT No.: PCT/US2022/023898

§ 371 Date: Oct. 9, 2023

Related U.S. Application Data
(60) Provisional application No. 63/171,799, filed on Apr. 7, 2021.

(51) Int. Cl. C07K 14/74; A61P 37/06; C07K 14/52; C07K 14/705; C07K 16/28; C12N 15/63; G01N 33/53

(52) U.S. Cl. CPC C07K 14/70539; A61P 37/06; C07K 14/52; C07K 14/70596; C07K 16/2803; C12N 15/63; G01N 33/53; C07K 2319/30

(57) ABSTRACT

Multimers are provided in which a Major Histocompatibility Complex (MHC) class I or class II molecule, optionally complexed with an MHC-binding peptide, is attached to a multimerization moiety from immunoglobulin M or A (IgM or IgA) to thereby create a multivalent peptide-MHC-Ig multimer composition. The multimers can be used, for example, to determine the binding specificity of T cell receptors, such as for particular MHC-peptide complexes. The multimers can also be used, for example, to modulate an immune response in a subject by administering the multimer to the subject. Methods of making the peptide-MHC-Ig multimers are also provided.

### CROSS REFERENCE TO RELATED APPLICATIONS

[0001] This application claims the benefit of and U.S. priority to Provisional Patent Application No. 63/171,799, filed on Apr. 7, 2021, the disclosure of which is incorporated herein by reference in its entirety for all purposes.

### BACKGROUND

[0002] The identification of peptides recognized by individual T cells is important for the understanding and treatment of immune-related diseases, as well as vaccine development and development of other prophylactic agents for the prevention of diseases. Techniques for the detection of antigen-responsive T cells exploit the interaction between a given TCR and its cognate peptide-MHC (pMHC) recognition motif. T cell detection using multimerized pMHC molecules has become the preferred method for detecting antigen-specific T cells in a wide variety of research and clinical situations.

[0003] Studies have shown that systemic delivery of MHC class I or class II ligands can expand disease-suppressing antigen-specific regulatory T cells by using a pMHC-containing complex to selectively target and dampen a certain immune response (e.g., an autoimmune response) without also suppressing overall “normal” immune system function (e.g., Singha et al. (2017) NAT. NANOTECHNOL., 12(7):701-710). Despite the ability to trigger differentiation and expansion of specific populations of T-cells using pMHC-based agents, no clinically-translatable agents and associated treatments have emerged from these studies.

[0004] Accordingly, despite the efforts that have been made to date, there remains a need for additional agents and methods for determining peptide-MHC-TCR interactions, as well as compositions for use in treating subjects in need of specific and selective modulation of T-cell-mediated immune responses.

### SUMMARY

[0005] The present disclosure provides multivalent Major Histocompatibility Complex (MHC) multimers that can be used for determining peptide-MHC-TCR interactions and for modulating immune responses in vivo. The multimers provided herein comprise a fusion of an MHC moiety and a multimerization moiety, wherein the MHC moiety comprises an MHC molecule, optionally bound with a cognate peptide, operatively linked to a multimerization moiety from an IgM or IgA molecule. In some embodiments, the MHC molecule comprises an MHC Class I or Class II molecule. In some embodiments, where an MHC molecule comprises an MHC Class I molecule, it is optionally bound with an MHC Class I binding peptide. In some embodiments, where an MHC molecule comprises an MHC Class II molecule, it is optionally bound with an MHC II binding peptide. In some embodiments, the multimerization moiety comprises a region from an IgM or IgA molecule. For example, in some embodiments, the multimerization moiety comprises at least one C region from IgM or IgA, as well as a tailpiece region from IgM or IgA, such that the fusion molecule forms multimers. In some embodiments, the multimerization moiety comprises a tailpiece region of IgM or IgA alone. Thus, such multimers are multivalent and soluble. The combination of the peptide-MHC complex and the multi-valency of IgM or IgA results in a peptide-MHC-IgM or peptide-MHC-IgA fusion molecule with high avidity toward a T cell receptor (TCR) that recognizes the peptide-MHC complex. Still further, the multimers can comprise an effector moiety to impart the fusion molecule with effector-moiety mediated immunomodulatory functionality.

[0006] Multimers in accordance with the present disclosure can be used as therapeutic agents by administration to a subject in need thereof. For example, in some embodiments, administration of a composition comprising a multimer provided herein can modulate an immune response in a subject, such as in the treatment of autoimmune disorders with known pMHC drivers. In some embodiments, multimers can also be used as therapeutic agents by treating cells ex vivo and administering cells contacted by multimers to a subject to modulate an immune response. Thus, in some embodiments, peptide-MHC-Ig multimers provided herein offer an alternative route to autoantigen tolerization in autoimmunity while still exploiting the specificity of the TCR/pMHC interaction. Moreover, the multimers of the disclosure can be used for detecting pMHC/TCR interactions, e.g., in in vitro assays.

[0007] Accordingly, in some embodiments, the present disclosure provides a Major Histocompatibility Complex (MHC) multimers comprising an MHC moiety operatively linked to a multimerization moiety, wherein: (a) the MHC moiety comprises an MHC molecule, optionally bound with a cognate peptide; and (b) the multimerization moiety comprises (i) an IgM Cμ4 constant region and a tailpiece region; or (ii) an IgA Cα3 constant region and a tailpiece region, wherein the tailpiece region in (b)(i) or (b)(ii) is an IgM tailpiece region or an IgA tailpiece region.

[0008] In some embodiments, the Major Histocompatibility Complex (MHC) multimer comprises (i) an MHC Class I molecule, optionally bound with an MHC Class I-binding peptide; or (ii) an MHC Class II molecule, optionally bound with an MHC Class II-binding peptide; and (b) the multimerization moiety comprises (i) an IgM Cμ4 constant region and a tailpiece region; or (ii) an IgA Cα3 constant region and a tailpiece region, wherein the tailpiece region in (b)(i) or (b)(ii) is an IgM tailpiece region or an IgA tailpiece region.

[0009] In some embodiments, the present disclosure provides multimers comprising an MHC moiety operatively linked to a multimerization moiety, wherein the MHC moiety comprises an MHC molecule bound with a cognate peptide.

[0010] In some embodiments, a multimer comprises an MHC moiety operatively linked to a multimerization moiety, wherein: (a) the MHC moiety comprises an MHC molecule; and (b) the multimerization moiety comprises (i) an IgM Cμ4 constant region and a tailpiece region; or (ii) an IgA Cα3 constant region and a tailpiece region, wherein the tailpiece region in (b)(i) or (b)(ii) is an IgM tailpiece region or an IgA tailpiece region.

[0011] In some embodiments, the multimerization moiety comprises an IgM Cμ4 constant region and an IgM tailpiece region and further comprises an IgM Cμ3 constant region. In some embodiments, the multimerization moiety comprises an IgM Cμ4 constant region and an IgM tailpiece region and further comprises an IgM Cμ2 constant region. In some embodiments, the multimerization moiety comprises an IgM Cμ4 constant region and an IgM tailpiece region and further comprises an IgM Cμ1 constant region. In some embodiments, the multimerization moiety comprises an IgM Cμ4 constant region and an IgM tailpiece region and further comprises IgM Cμ2 and Cμ3 constant regions. In some embodiments, the multimerization moiety comprises an IgM Cμ4 constant region and an IgM tailpiece region and further comprises IgM Cμ1 and Cμ3 constant regions. In some embodiments, the multimerization moiety comprises an IgM Cμ4 constant region and an IgM tailpiece region and further comprises IgM Cμ1 and Cμ2 constant regions. In some embodiments, the multimerization moiety comprises an IgM Cμ4 constant region and an IgM tailpiece region and further comprises IgM Cμ1, Cμ2 and Cμ3 constant regions.

[0012] In some embodiments, the multimerization moiety comprises an IgA Cα3 constant region and an IgA tailpiece region and further comprises an IgA Cα2 constant region. In some embodiments, the multimerization moiety comprises an IgA Cα3 constant region and an IgA tailpiece region and further comprises an IgA Cal constant region. In some embodiments, the multimerization moiety comprises an IgA Cα3 constant region and an IgA tailpiece region and further comprises IgA Cal and Cα2 constant regions.

[0013] In some embodiments of the multimerization moiety, the IgM or IgA tailpiece region alone is used for multimerization, without inclusion of any immunoglobulin C regions. Accordingly, in another aspect, the disclosure pertains to a Major Histocompatibility Complex (MHC) multimer comprising an MHC moiety operatively linked to a multimerization moiety, wherein: (a) the MHC moiety comprises (i) an MHC Class I molecule, optionally bound with an MHC Class I-binding peptide; or (ii) an MHC Class II molecule, optionally bound with an MHC Class II-binding peptide; and (b) the multimerization moiety comprises an IgM tailpiece region or an IgA tailpiece region.

[0014] In certain embodiments, the multimerization moiety comprises the IgM tailpiece region. In other embodiments, the multimerization moiety comprises the IgA tailpiece region.

[0015] In some embodiments of the multimer, the MHC moiety is operatively linked to the multimerization moiety through an MHC Class I α chain. In other embodiments, the MHC moiety is operatively linked to the multimerization moiety through an MHC Class I β2-microglobulin. In still other embodiments, the MHC moiety is operatively linked to the multimerization moiety through an MHC Class II β chain. In some embodiments, the MHC moiety is operatively linked to the multimerization moiety through an MHC Class II α chain.

[0016] In some embodiments, the MHC moiety comprises an MHC Class I molecule bound with an MHC Class I-binding peptide. In some embodiments, the MHC moiety is operatively linked to the multimerization moiety through an MHC Class I α chain. In certain embodiments, the MHC moiety comprises MHC Class I α and β2-microglobulin chains.

[0017] In some embodiments, the MHC moiety is in a single polypeptide comprising, from the N-terminus to the C-terminus, the MHC Class I binding peptide, a linker, a β2M chain, a second linker, and an MHC Class I α chain, wherein the MHC Class I α chain optionally comprises a Y84A substitution. In some embodiments, the MHC Class I α chain comprises a Y84C substitution, and the first linker comprises a cysteine residue, such that a disulfide bond forms between the cysteine residue corresponding to position 84 of the MHC Class I α chain and the cysteine residue of the first linker.

[0018] In some embodiments, the MHC moiety comprises an MHC Class II molecule bound with an MHC Class II-binding peptide. In certain embodiments, the MHC moiety comprises MHC Class II α and β chains. In some embodiments, the MHC moiety is linked to the multimerization moiety through an MHC Class II β chain or an MHC Class II α chain. In some embodiments, the multimer further comprises a first heterodimerization motif operatively linked to an α chain of the MHC Class II molecule, and a second heterodimerization motif linked to a β chain of the MHC Class II molecule, wherein the first and second heterodimerization motifs form a heterodimer. In some embodiments, the first and/or second heterodimerization motifs are linked to the multimerization moiety. In some such embodiments, the first and/or second heterodimerization motifs comprise a leucine zipper.

[0019] In certain embodiments, the multimer further comprises an immunoglobulin J chain.

[0020] In certain embodiments, the multimer is soluble. In other embodiments, the multimer can be fixed to a solid support (e.g., a plate or a bead).

[0021] In certain embodiments, the MHC moiety is a single chain molecule (e.g., a single chain comprising a Class I-binding peptide, an MHC Class I α chain and a β2-microglobulin chain, with linkers interspersed, as described further herein).

[0022] In some embodiments, the multimer is a dimer, a trimer, a tetramer, a pentamer, or a hexamer. In one embodiment, the multimer is in a composition comprising a mixture of at least two multimers selected from the group consisting of dimers, trimers, tetramers, pentamers, and hexamers.

[0023] In some embodiment, the MHC moiety and the multimerization moiety are separated by a linker. In some such embodiments, the linker is a flexible linker, a rigid linker or a semi-rigid linker.

[0024] In certain embodiments, the multimer comprises an immunoglobulin J chain and the multimer further comprises an effector moiety operatively linked to the J chain. In some embodiments, the multimer comprises an effector moiety, optionally, wherein the effector moiety is operatively linked to the multimerization moiety.

[0025] In certain embodiments, the effector moiety comprises a checkpoint protein agonist, e.g., a checkpoint protein agonist antibody. In some embodiments, the checkpoint protein agonist comprises a PD-L1 extracellular domain or domain 1, an anti-PD1 agonist antibody, an anti-CTLA4 agonist antibody, an anti-Lag3 agonist antibody, an anti-TIM3 agonist antibody, an anti-TIGIT agonist antibody, an anti-LILRB1 agonist antibody, an anti-LILRB2 agonist antibody, or any portion or antigen-binding fragment thereof.

[0026] In other embodiments, the effector moiety comprises a TNFR family protein agonist. In some embodiments, the TNFR family protein agonist comprises 4-1BBL (CD137L), an anti-CD137 agonist antibody or any portion or antigen-binding fragment thereof, an anti-TNFR2 agonist antibody, or any portion or antigen-binding fragment thereof.

[0027] In some embodiments, the effector moiety comprises an anti-inflammatory agent (e.g., cytokine). In some such embodiments, the anti-inflammatory cytokine comprises IL10 or TGFβ. In some embodiments, the anti-inflammatory agent comprises an extracellular region of HLA-G, an anti-LILRB1 agonist antibody, an anti-LILRB2 agonist antibody, or any fragments or variants thereof.

[0028] In certain embodiments, the effector moiety comprises an immune cell engaging agent. In some embodiments, the immune cell engaging agent comprises an anti-CD3 antibody, an anti-NKp46 antibody, an anti-CD16a antibody, an anti-CD56 antibody, an anti-NKG2D antibody, an anti-NKp30 antibody, an anti-CD64 antibody, or any portion or antigen-binding fragments thereof. In other embodiments, the effector moiety comprises a cytokine. In some such embodiments, the cytokine comprises IL-2, IL-12, IL-15, TGFβ, or any variants or fragments thereof. In certain embodiments, where the cytokine comprises IL2, the IL-2 comprises a variant with reduced or no binding affinity for CD25/IL2Rα.

[0029] In certain embodiments, the effector moiety comprises a cell-death-inducing agent. In some embodiments, the cell-death-inducing agent comprises a tubulin inhibitor, a DNA damaging agent, FasL, anti-Fas agonist antibody or any portion or antigen-binding fragment thereof

[0030] In some embodiments, the effector moiety comprises a PD-1 binding moiety, such as a PD-1 agonist antibody or antigen binding fragment thereof. In one embodiment, the PD-1 binding moiety comprises PD-L1, such as PD-L1 ECD or domain 1.

[0031] In some embodiments, a subject suffering from an autoimmune disease or from cancer may be treated by administering a multimer comprising an effector moiety in accordance with the present disclosure.

[0032] In certain embodiments, the disclosure provides a composition comprising at least two multimers in accordance with the present disclosure, wherein the at least two multimers are in a mixture and wherein the multimers are selected from the group consisting of dimers, trimers, tetramers, pentamers, and hexamers.

[0033] In certain embodiments, the effector moiety is attached to the multimer through a linker (e.g., positioned between the J chain and the effector moiety or between the multimerization moiety and the effector moiety). In some embodiments, the linker is a flexible linker, a rigid linker, or a semi-rigid linker.

[0034] In yet another embodiment, the multimer further comprises one or more heterologous functional domains (e.g., a moiety for half-life extension, a cytokine, a cytokine receptor).

[0035] Multimers of the disclosure can be prepared by chemical conjugation of the components (as described further herein) but more typically are prepared recombinantly using expression vectors encoding the multimer components introduced into host cells. Accordingly, in another aspect, the disclosure pertains to isolated nucleic acids encoding subunits of the Major Histocompatibility Complex (MHC) multimers. In some embodiments, one or more multimers provided herein is/are encoded by one or more isolated nucleic acid molecules.

[0036] In some aspects, the present disclosure provides isolated nucleic acid molecules encoding an MHC moiety operatively linked to a multimerization moiety, wherein: (a) the MHC moiety comprises an MHC molecule and optionally a cognate peptide; and (b) the multimerization moiety comprises (i) an IgM Cμ4 constant region and a tailpiece region; or (ii) an IgA Cα3 constant region and a tailpiece region, wherein the tailpiece region in (b)(i) or (b)(ii) is an IgM tailpiece region or an IgA tailpiece region.

[0037] In some embodiments, the MHC moiety comprises (i) an MHC Class I molecule, and optionally an MHC Class I-binding peptide; or (ii) an MHC Class II molecule and optionally an MHC Class II-binding peptide.

[0038] In some aspects, the present disclosure provides isolated nucleic acid molecules encoding an MHC moiety operatively linked to a multimerization moiety, wherein: (a) the MHC moiety comprises (i) an MHC Class I molecule, optionally bound with an MHC Class I-binding peptide; or (ii) an MHC Class II molecule, optionally bound with an MHC Class II-binding peptide; and (b) the multimerization moiety comprises (i) an IgM Cμ4 constant region and a tailpiece region; or (ii) an IgA Cα3 constant region and a tailpiece region, wherein the tailpiece region in (b)(i) or (b)(ii) is an IgM tailpiece region or an IgA tailpiece region.

[0039] In some embodiments of the isolated nucleic acid, the multimerization moiety comprises an IgM Cμ4 constant region and an IgM tailpiece region and further comprises an IgM Cμ3 constant region. In some embodiments, the multimerization moiety comprises an IgM Cμ4 constant region and an IgM tailpiece region and further comprises an IgM Cμ2 constant region. In some embodiments, the multimerization moiety comprises an IgM Cμ4 constant region and an IgM tailpiece region and further comprises an IgM Cμ1 constant region. In some embodiments, the multimerization moiety comprises an IgM Cμ4 constant region and an IgM tailpiece region and further comprises IgM Cμ2 and Cμ3 constant regions. In some embodiments, the multimerization moiety comprises an IgM Cμ4 constant region and an IgM tailpiece region and further comprises IgM Cμ1 and Cμ3 constant regions. In some embodiments, the multimerization moiety comprises an IgM Cμ4 constant region and an IgM tailpiece region and further comprises IgM Cμ1 and Cμ2 constant regions. In some embodiments, the multimerization moiety comprises an IgM Cμ4 constant region and an IgM tailpiece region and further comprises IgM Cμ1, Cμ2 and Cμ3 constant regions.

[0040] In one embodiment of the isolated nucleic acid, the multimerization moiety comprises an IgA Cα3 constant region and an IgA tailpiece region and further comprises an IgA Cα2 constant region. In one embodiment, the multimerization moiety comprises an IgA Cα3 constant region and an IgA tailpiece region and further comprises an IgA Cal constant region. In one embodiment, the multimerization moiety comprises an IgA Cα3 constant region and an IgA tailpiece region and further comprises IgA Cal and Cα2 constant regions.

[0041] In another embodiment of the isolated nucleic acid encoding the MHC multimer, the multimerization moiety comprises the IgM or IgA tailpiece region alone, without inclusion of any immunoglobulin C regions. Accordingly, in one aspect, the disclosure pertains to isolated nucleic acid molecules encoding multimers comprising a MHC moiety operatively linked to a multimerization moiety, wherein: (a) the MHC moiety comprises (i) an MHC Class I molecule, optionally bound with an MHC Class I-binding peptide; or (ii) an MHC Class II molecule, optionally bound with an MHC Class II-binding peptide; and (b) the multimerization moiety comprises an IgM tailpiece region or an IgA tailpiece region.

[0042] In certain embodiments, the multimerization moiety comprises the IgM tailpiece region. In other embodiments, the multimerization moiety comprises the IgA tailpiece region.

[0043] In some embodiments, the MHC moiety is operatively linked to the multimerization moiety through an MHC Class I α chain. In some embodiments, the MHC moiety is operatively linked to the multimerization moiety through an MHC Class II β chain or an MHC Class II α chain.

[0044] In one embodiment of the isolated nucleic acid, the MHC moiety and the multimerization moiety are separated by a linker. In some embodiments, a linker is a flexible linker, a rigid linker, or a semi-rigid linker.

[0045] In yet another aspect, the disclosure pertains to expression vectors and host cells comprising a nucleic acid of the disclosure. In some embodiments, an isolated nucleic acid encoding a peptide-MHC-IgM or peptide-MHC-IgA fusion provided in accordance with the present disclosure can be incorporated into an expression vector and the expression vector can be introduced into a host cell to thereby express the fusion protein. In certain embodiments, the host cell comprises an expression vector encoding an MHC moiety comprising an MHC chain linked to the IgM or IgA C region. In other embodiments, a host cell further comprises an expression vector encoding the cognate MHC chain that pairs with its Class I or Class II counterpart (e.g., resulting in Class I α/β2microglobulin pairs or Class II α/β pairs in the host cell).

[0046] In meso embodiments, the host cell further comprises an expression vector encoding an immunoglobulin J chain and a separate expression vector encoding the multimer. In some embodiments, in the expression vector, the immunoglobulin J chain is operatively linked to an effector moiety. In one embodiment, the effector moiety comprises a PD-1 binding moiety. In one embodiment, the PD-1 binding moiety comprises PD-L1.

[0047] Methods of preparing multimers of the disclosure are also provided wherein host cells carrying expression vectors encoding the multimer components are cultured to thereby express the multimer. In some embodiments, the method further comprises isolating the multimer from the host cells or the host cell culture supernatant.

[0048] In yet another aspect, the disclosure provides pharmaceutical compositions comprising a multimer of the disclosure and a pharmaceutically acceptable carrier.

[0049] In certain embodiments, the present disclosure provides kits comprising a multimer in as provided herein, which multimer is packaged in a container with instructions for use in detecting peptide-MHC-TCR interactions and/or modulating an immune response.

[0050] In yet another aspect, the disclosure provides methods of detecting a TCR-peptide-MHC complex. In some embodiments, the method comprises contacting a TCR with a multimer of the disclosure and detecting binding of the TCR to the multimer to thereby detect binding of the TCR to the peptide-MHC complex of the multimer. In some embodiments, the multimer comprises a detectable moiety. In one embodiment, the TCR is on the surface of T cell and the multimer is contacted with the T cell.

[0051] In yet another aspect, the disclosure provides methods of modulating an immune response in a subject. In some such embodiments, the method comprises administering to the subject an effective amount of a multimer of the disclosure or a pharmaceutical composition comprising a multimer of the disclosure such that an immune response is modulated in the subject.

[0052] In certain embodiments, the subject has an autoimmune disorder and the immune response to the autoimmune disorder is modulated (e.g., down modulated). In other embodiments, the subject has an inflammatory disorder and the immune response to the inflammatory disorder is modulated (e.g., down modulated). Accordingly, in certain embodiments, the disclosure provides methods of treating an autoimmune disorder in a subject, the method comprising administering to the subject a multimer of the disclosure, wherein the MHC moiety of the multimer recognizes an autoantigen of the subject's autoimmune disorder. In some embodiments, the autoimmune disorder is Type I diabetes. In some embodiments, the autoantigen is an insulin autoantigen. In some embodiments, the subject is further treated with one or more additional therapies.

[0053] In some embodiments, the present disclosure provides methods of treating an infectious disease. In some such embodiments, the infectious disease is a virus. In some embodiments, cells infected by the virus are targeted (e.g., in cis or trans as provided and described herein) by multimers of the present disclosure.

[0054] In certain embodiments, the present disclosure provides methods of treating cancer. In some embodiments, the method of treating cancer comprises using an immunotherapy comprising administering to a subject diagnosed with cancer a multimer provided by the present disclosure or a pharmaceutical composition comprising a multimer provided by the present disclosure. In some such embodiments, cancer cells are targeted (e.g., in cis or trans as provided and described herein) by multimers of the present disclosure.

[0055] Among other things, in some aspects, the present disclosure provides use of an MHC multimer in the manufacture of a medicament for treating an autoimmune disorder, inflammatory disorder, infectious disease, or cancer. In some embodiments, the present disclosure provides a method of treating cancer using an immunotherapy comprising administering to a subject diagnosed with cancer a multimer as provided herein. In some embodiments, the subject is treated with one or more additional therapies.

[0056] Further details of the nature and advantages of the present disclosure can be found in the following detailed description taken in conjunction with the accompanying figures. The present disclosure is capable of modification in various respects without departing from the spirit and scope of the present disclosure. Accordingly, the figures and description of these embodiments are not restrictive.

### BRIEF DESCRIPTION OF THE FIGURES

[0057] A better understanding of the features and advantages of the present disclosure will be obtained by reference to the following detailed description that sets forth illustrative embodiments, in which the principles of the disclosure are utilized, and the accompanying drawings of which:

[0058] FIGS. 1A-1C are schematic representations of exemplary MHC multimers of the disclosure. In FIG. 1A, the multimer comprises an MHC moiety of an MHC Class I α chain, paired with β2-microglobulin and bound with an MHC Class I-binding peptide, and a multimerization moiety of an IgM Cμ3 and Cμ4 constant regions and IgM tailpiece region, as well as an immunoglobulin J chain. In FIG. 1B, the multimer is the same as in FIG. 1A except that the multimerization moiety includes IgM Cμ2, Cμ3, and Cμ4 constant regions and IgM tailpiece region. In FIG. 1C, the multimer comprises an MHC moiety of an MHC Class I α chain, paired with β2-microglobulin and bound with an MHC Class I-binding peptide, and a multimerization moiety of an IgA Cα2 and Cα3 constant region and IgA tailpiece region, as well as an immunoglobulin J chain. In FIG. 1D, the multimer is a single-chain pMHC comprising an MHC moiety of an MHC Class I α chain, paired with β2-microglobulin and bound with an MHC Class I-binding peptide, with at least one linker between the MHC Class I-binding peptide and the β2-microglobulin, and a multimerization moiety of an IgM Cμ3 and Cμ4 constant regions and IgM tailpiece region, as well as an immunoglobulin J chain. Disulfide bridges are indicated by dashed lines; linkers are indicated by double-dashed lines (FIG. 1D).

[0059] FIGS. 2A-2C are schematic representations of exemplary MHC multimers of the disclosure that comprise an effector/targeting moiety (labeled “effector moiety”). In FIG. 2A, the multimer comprises an MHC moiety of an MHC Class I α chain, paired with β2-microglobulin and bound with an MHC Class I-binding peptide, and a multimerization moiety of an IgM Cμ3 and Cμ4 constant regions and IgM tailpiece region, as well as an immunoglobulin J chain linked to an effector/targeting moiety (labeled “effector moiety”). In FIG. 2B, the multimer is the same as in FIG. 2A except that the multimerization moiety includes IgM Cμ2, Cμ3, and Cμ4 constant regions and IgM tailpiece region. In FIG. 2C the multimer comprises an MHC moiety of an MHC Class I α chain, paired with β2-microglobulin and bound with an MHC Class I-binding peptide, and a multimerization moiety of an IgA Cα2 and Cα3 constant region and IgA tailpiece region, as well as an immunoglobulin J chain linked to an effector/targeting moiety (labeled “effector moiety”). Disulfide bridges are indicated by dashed lines.

[0060] FIGS. 3A-3C are schematic representations of exemplary MHC multimers of the disclosure. In FIG. 3A, the multimer comprises an MHC moiety of an MHC Class II α chain, paired with an MHC Class II β chain and bound with an MHC Class II-binding peptide, and a multimerization moiety of an IgM Cμ3 and Cμ4 constant regions and IgM tailpiece region, as well as an immunoglobulin J chain. In FIG. 3B, the multimer is the same as in FIG. 3A except that the multimerization moiety includes IgM Cμ2, Cμ3 and Cμ4 constant regions and IgM tailpiece region. In FIG. 3C the multimer comprises an MHC moiety of an MHC Class II α chain, paired with an MHC Class II β chain and bound with an MHC Class II-binding peptide, and a multimerization moiety of an IgA Cα2 and Cα3 constant region and IgA tailpiece region, as well as an immunoglobulin J chain. Disulfide bridges are indicated by dashed black lines.

[0061] FIGS. 4A-4C are schematic representations of exemplary MHC multimers of the disclosure. In FIG. 4A, the multimer comprises an MHC moiety of an MHC Class II α chain, paired with an MHC Class II β chain and bound with an MHC Class II-binding peptide, and a multimerization moiety of an IgM Cμ3 and Cμ4 constant regions and IgM tailpiece region, as well as an immunoglobulin J chain linked to an effector/targeting moiety (labeled “effector moiety”). In FIG. 4B, the multimer is the same as in FIG. 4A except that the multimerization moiety includes IgM Cμ2, Cμ3, and Cμ4 constant regions and IgM tailpiece region. In FIG. 4C the multimer comprises an MHC moiety of an MHC Class II α chain, paired with an MHC Class II β chain and bound with an MHC Class II-binding peptide, and a multimerization moiety of an IgA Cα2 and Cα3 constant region and IgA tailpiece region, as well as an immunoglobulin J chain linked to an effector/targeting moiety (labeled “effector moiety”). Disulfide bridges are indicated by dashed black lines.

[0062] FIGS. 5A-5I are schematic representations of exemplary nucleic acid constructs used to recombinantly express an MHC multimer of the disclosure. Components of the multimer encoded by each nucleic acid are indicated (P=Peptide, L=Linker, tp=tailpiece, J=J chain, EM=effector moiety, HetD1=heterodimerization domain 1, HetD2=heterodimerization domain 2, T2A=T2A self-cleaving peptide). FIG. 5A is a schematic representation of exemplary constructs encoding peptide-β2m-MHC Class I-IgM and J-chain. FIG. 5B is a schematic representation of exemplary constructs encoding peptide-β2m-MHC Class I-IgM and J-chain-EM fusion. FIG. 5C is a schematic representation of exemplary constructs encoding peptide-MHC Class II β-IgM, MHC Class II α, and J-chain. FIG. 5D is a schematic representation of exemplary constructs encoding peptide-MHC Class II β-IgM, MHC Class II α, and J-chain-EM fusion. FIG. 5E is a schematic representation of exemplary constructs encoding peptide-MHC Class II β-IgM and a bicistronic construct encoding MHC Class II α and J-chain-EM fusion. FIG. 5F is a schematic representation of exemplary constructs encoding peptide-MHC Class II β-heterodimerization domain 1-IgM, MHC Class II α-heterodimerization domain 2, and J-chain. FIG. 5G is a schematic representation of exemplary constructs encoding peptide-MHC Class II β-heterodimerization domain 1-IgM and a bicistronic exemplary construct encoding MHC Class II α-heterodimerization domain 2 and J-chain. FIG. 5H is a schematic representation of exemplary constructs encoding peptide-MHC Class II β-heterodimerization domain 1-IgM, MHC Class II α-heterodimerization domain 2, and J-chain-EM fusion. FIG. 5I is a schematic representation of exemplary constructs encoding peptide-MHC Class II β-heterodimerization domain 1-IgM and a bicistronic construct encoding MHC Class II α-heterodimerization domain 2 and J-chain-EM fusion.

[0063] FIG. 6A is a schematic representation of an exemplary bispecific MHC class I multimer of the disclosure comprising two different MHC-binding peptides (Peptide 1 and Peptide 2). The use of knob-into-hole (KIH) bispecific technology to promote heterodimerization of the Cμ2, Cμ3, and/or Cμ4 regions is indicated. FIG. 6B is a schematic representation of an exemplary bispecific MHC class I multimer of the disclosure comprising one or two different MHC-binding peptides (Peptide 1 and Peptide 2). The use of knob-into-hole (KIH) bispecific technology to promote heterodimerization of the Cα2 and Cα3 regions is indicated. Disulfide bridges are indicated by dashed lines.

[0064] FIG. 7 illustrates a schematic representation of a process for assessing the ability of an exemplary pMHC-Ig-immunosuppressor to suppress the activity of target T cells, where (I) represents measurement of increased % live target cells, (II) represents monitoring reduced activation level of effector T cells by flow cytometry or by western blot, (III) represents measurement of reduced proliferation of antigen-specific T cells, and (IV) represents testing for reduced cytokine secretion (e.g., IFNγ, IL2, and/or TNFα).

[0065] FIG. 8 is a schematic representation of an approach for assessing the ability of pMHC-Ig-FasL for inducing T cell apoptosis.

[0066] FIG. 9 is a schematic representation of an approach for assessing the ability of pMHC-Ig-cytotoxin for inducing targeted T cell death.

[0067] FIG. 10 is a schematic representation of an approach for assessing the ability of pMHC-Ig-anti-CD3 for redirected T cell killing.

[0068] FIG. 11 is a schematic representation of an approach for assessing the ability of pMHC-Ig fusions for efficacy to expand regulatory T cells. Exemplary fusions include: TGFβ, TNFR2 agonist, TRAIL, TRAIL-R1, and/or TRAIL-R2 agonist.

[0069] FIGS. 12A-12C show results from expression and purification of an exemplary MHC multimer. FIG. 12A shows a western blot of a MHC multimer expression sample in EXPI293 cells probed with Anti-IgM (left panel) and Anti-Flag antibodies for the J-chain (right panel). FIG. 12B shows a western blot of MHC multimer sample fractions probed with Anti-IgM (left panel) and Anti-Flag antibodies (right panel) after immobilized metal affinity chromatography (IMAC) purification. FIG. 12C shows an SEC purification chromatogram of a MHC multimer.

[0070] FIGS. 13A-13C show results of a purity analysis from an exemplary overexpressed Class I pMHC-IgM protein. FIG. 13A shows an analytical Size Exclusion Chromatogram (SEC) of purified Class I pMHC-IgM protein. FIG. 13B shows a SDS-PAGE-Coomassie (left panel) and western blots (two right panels) with anti-IgM and anti-Flag antibodies that show presence of IgM and J-chain in a non-reduced, unboiled sample. FIG. 13C shows a SDS-PAGE-Coomassie (left panel) and western blots (right panels) with anti-IgM and anti-Flag antibodies that show presence of IgM and J-chain in a reduced, boiled sample.

[0071] FIG. 14A shows results of a flow cytometry study, which shows binding of ELA-HLA-A2-IgM to peptide expanded T cells: ELAGIGILTV-expanded T cells (upper panels), non-cognate peptide-expanded T cells (lower panels). FIG. 14B shows flow cytometry plots of pMHC-IgM to ELA/HLA-A2-specific TCR Jurkat cells at 6 nM concentration. The upper left panel shows IgM Fc control, the upper right panel shows ELA/HLA-A2-IgM, the lower left panel shows non-cognate-peptide 9-mer 2-HLA-A2-IgM, and the lower right panel shows ELA-HLA-A2-SA tetramer.

[0072] FIG. 15 shows the Mean Fluorescence Intensity (MFI) of pMHC-IgM binding to anti-MART1-Jurkat cells as measured by flow cytometry at various concentrations (0.24 nM, 1.2 nM, 6 nM, 30 nM, and 150 nM). IgM-Fc, non-cognate-peptide 9-mer 2-HLA-A2/IgM and UV-exchanged ELA-HLA-A2-SA tetramers were included as controls.

[0073] FIGS. 16A-16C show results from the production of an exemplary Class II pMHC-IgM protein. FIG. 16A shows post-expression protein samples on western blots detecting the IgM with anti-IgM antibody (third from left panel), the α chain with anti-Myc antibody (right panel), and the J-chain with anti-Flag antibody (second from left panel). FIG. 16B shows post-gravity purification with Ni Excel resin protein samples on western blots detecting IgM with anti-IgM antibody (right panel) and α chain with anti-Myc antibody (left panel). The box indicates the area of the gel where both antibody signals overlay with each other. FIG. 16C shows post-SEC purification western blots detecting J-chain with anti-Flag antibody (left panel), IgM with anti-IgM antibody (middle panel), and α chain with anti-Myc antibody (right panel).

[0074] FIGS. 17A-17B depict an exemplary single chain HLA (sc-HLA) (FIG. 17A) and an exemplary cysteine engineered disulfide stabilized sc-HLA (cys-trap) (FIG. 17B). FIG. 17C shows western blots of three sc-HLA-IgM loaded with exemplary 9-mer 5, 9-mer 4, and 9-mer 2 peptides without or with engineered disulfide probed with anti-IgM (left panel) and anti-Flag (right panel) antibodies.

[0075] FIGS. 18A-18D show results from production of an exemplary Class I pMHC-IgM with multiple immunomodulators (J-chain, anti-CD3, and PD-L1). FIGS. 18A and 18B show western blots performed on purified KLW-A2-IgM with J-chain, anti-CD3, or PD-L1 using an anti-human IgM antibody conjugated to DyLight800 and an anti-DYKDDDDK (anti-Flag) conjugated to DyLight680 to confirm the presence of both the pMHC-IgM chain and J-chain, respectively. In FIG. 18A: non-boiled, nonreduced samples, FIG. 18B: boiled, reduced samples. FIG. 18C shows SDS-PAGE with Coomassie staining for non-reduced (left panel) and reduced (right panel) samples. Lanes 1: J chain, 2: OKT3-J chain (anti-CD3), 3: PD-L1-ECD-J chain. FIG. 18D shows exemplary representative production yields in mg/L of KLW-A2-IgM with J-chain, anti-CD3, and PD-L1.

[0076] FIG. 19A-19B illustrate a schematic representation of an approach for producing a pMHC-IgM protein via sortase addition (FIG. 19A) or via click chemistry (FIG. 19B).

[0077] FIGS. 20A-20B show results from generation of an exemplary pMHC-IgM through a sortase reaction. FIG. 20A shows a western blot analysis of sortase reactions to conjugate pMHC monomer to IgM-Fc, under two different reaction conditions: Reaction 1 and Reaction 2. The antibodies used were an anti-human IgM antibody conjugated to DyLight800 and an anti-HLA A chain conjugated to DyLight680 to confirm the presence of both the IgM and HLA chains, respectively. FIG. 20B shows an analytical SEC on starting samples and Reaction 1 and 2 to confirm high valency of HLA in Reaction 1; corresponding western blot lanes are indicated in the table to the right of the chromatogram.

[0078] FIG. 21 shows exemplary flow cytometric analyses demonstrating that pMHC-IgM multimers produced via sortase reactions bind cognate engineered TCR cell lines.

### DETAILED DESCRIPTION

[0079] The present disclosure provides technologies such as compositions, methods of manufacturing, and methods of treatment comprising multivalent Major Histocompatibility Complex (MHC) multimers. As provided herein, each MHC multimer comprises a fusion of an MHC moiety and a multimerization moiety, wherein the MHC moiety comprises an MHC Class I molecule, optionally bound with an MHC Class I-binding peptide, or an MHC Class II molecule, optionally bound with an MHC Class II-binding peptide, operatively linked to a multimerization moiety that comprises at least one C region from an IgM or IgA molecule such that the fusion molecule forms multimers. The multimers of the disclosure can further comprise an immunoglobulin J chain, which facilitates formation of certain forms of multimers (e.g., pentamers). Additionally, the multimers can further comprise an effector/targeting moiety, which can facilitate cellular redirection, such as suppressing or killing, supporting, or otherwise influencing certain T cell populations to treat autoimmune diseases and cancer.

[0080] The MHC multimers can be prepared with a peptide bound to the peptide-binding groove of the MHC molecule by expression in a host cell using an expression construct that includes encoding of the peptide epitope. For example, in one embodiment, an expression construct is used that encodes the peptide and additional multimer components, wherein the peptide is fused with a flexible linker to an MHC chain of the MHC moiety of the multimer.

[0081] Alternatively, “empty” MHC multimers, comprising non-peptide-bound MHC Class I or Class II molecules linked to the IgM- or IgA-derived multimerization domain, can be prepared and then subsequently loaded with antigenic peptide, as described herein. In one embodiment, the “empty” multimers are prepared using a similar strategy to that of the peptide-loaded multimers except that the peptide moiety is omitted. Furthermore, one or more modifications can be introduced into an MHC chain to increase stability of the empty assembled MHC (see e.g., Example 4). Empty MHC molecules, and methods of preparing same, have been described in the art (see e.g., Serra et al. (2019) NATURE COMM. 10:4917).

[0082] Various components and aspects of the disclosure are described in further detail in the subsections below.

### I. Definitions

[0083] All technical and scientific terms used herein, unless otherwise defined below, are intended to have the same meaning as commonly understood by one of ordinary skill in the art. Mention of techniques employed herein are intended to refer to the techniques as commonly understood in the art, including variations on those techniques or substitutions of equivalent techniques that would be apparent to one of skill in the art. While the following terms are believed to be well understood by one of ordinary skill in the art, the following definitions are set forth to facilitate explanation of the presently disclosed subject matter.

[0084] Throughout the description, where compositions and kits are described as having, including, or comprising specific components, or where processes and methods are described as having, including, or comprising specific steps, it is contemplated that, additionally, there are compositions and kits of the present invention that consist essentially of, or consist of, the recited components, and that there are processes and methods according to the present invention that consist essentially of, or consist of, the recited processing steps.

[0085] In the disclosure, where an element or component is said to be included in and/or selected from a list of recited elements or components, it should be understood that the element or component can be any one of the recited elements or components, or the element or component can be selected from a group consisting of two or more of the recited elements or components.

[0086] Further, it should be understood that elements and/or features of a composition or a method provided and described herein can be combined in a variety of ways without departing from the spirit and scope of the present disclosure and invention(s) herein, whether explicit or implicit herein. For example, where reference is made to a particular compound, that compound can be used in various embodiments of compositions of the present disclosure and/or in methods of the present disclosure, unless otherwise understood from the context. In other words, within this application, embodiments have been described and depicted in a way that enables a clear and concise application to be written and drawn, but it is intended and will be appreciated that embodiments may be variously combined or separated without parting from the present teachings and invention(s). For example, it will be appreciated that all features described and depicted herein can be applicable to all aspects of invention(s) provided, described, and depicted herein.

[0087] As used herein, “about” will be understood by persons of ordinary skill and will vary to some extent depending on the context in which it is used. If there are uses of the term which are not clear to persons of ordinary skill given the context in which it is used, “about” will mean up to plus or minus 10% of the particular value.

[0088] The articles “a” and “an” are used in this disclosure to refer to one or more than one (i.e., to at least one) of the grammatical object of the article, unless the context is inappropriate. By way of example, “an element” means one element or more than one element.

[0089] The term “and/or” is used in this disclosure to mean either “and” or “or” unless indicated otherwise.

[0090] It should be understood that the expression “at least one of” includes individually each of the recited objects after the expression and the various combinations of two or more of the recited objects unless otherwise understood from the context and use. The expression “and/or” in connection with three or more recited objects should be understood to have the same meaning unless otherwise understood from the context.

[0091] The use of the term “include,” “includes,” “including,” “have,” “has,” “having,” “contain,” “contains,” or “containing,” including grammatical equivalents thereof, should be understood generally as open-ended and non-limiting, for example, not excluding additional unrecited elements or steps, unless otherwise specifically stated or understood from the context.

[0092] It should be understood that the order of steps or order for performing certain actions is immaterial so long as the present invention remain operable. Moreover, two or more steps or actions may be conducted simultaneously.

[0093] At various places in the present specification, variable or parameters are disclosed in groups or in ranges. It is specifically intended that the description include each and every individual subcombination of the members of such groups and ranges. For example, an integer in the range of 0 to 40 is specifically intended to individually disclose 0, 1, 2, 3, 4, 5, 6, 7, 8, 9, 10, 11, 12, 13, 14, 15, 16, 17, 18, 19, 20, 21, 22, 23, 24, 25, 26, 27, 28, 29, 30, 31, 32, 33, 34, 35, 36, 37, 38, 39, and 40, and an integer in the range of 1 to 20 is specifically intended to individually disclose 1, 2, 3, 4, 5, 6, 7, 8, 9, 10, 11, 12, 13, 14, 15, 16, 17, 18, 19, and 20.

[0094] The use of any and all examples, or exemplary language herein, for example, “such as” or “including,” is intended merely to illustrate better the present disclosure and does not pose a limitation on the scope of any invention(s) unless claimed. No language in the specification should be construed as indicating any non-claimed element as essential to the practice of that provided by the present disclosure.

[0095] The terms “antigenic peptide”, “antigenic determinant” or “epitope” refer to a site on an antigen to which a T-cell receptor, an MHC molecule or antibody specifically binds. Epitopes can be formed both from contiguous amino acids or noncontiguous amino acids juxtaposed by tertiary folding of a protein. Epitopes formed from contiguous amino acids are typically retained on exposure to denaturing solvents, whereas epitopes formed by tertiary folding are typically lost on treatment with denaturing solvents. An epitope typically includes at least 3, 4, 5, 6, 7, 8, 9, 10, 11, 12, 13, 14 or 15 amino acids in a unique spatial conformation and typically can include up to about 25 amino acids. Methods for determining what epitopes are bound by a given TCR or antibody (i.e., epitope mapping) are well known in the art and include, for example, immunoblotting and immunoprecipitation assays, wherein overlapping or contiguous peptides from the antigen are tested for reactivity with the given TCR or immunoglobulin. Methods of determining spatial conformation of epitopes include techniques in the art and those described herein, for example, x-ray crystallography, nuclear magnetic resonance, cryo-electron microscopy (cryo-EM), hydrogen deuterium exchange mass spectrometry (HDX-MS), and site-directed mutagenesis (see, e.g., EPITOPE MAPPING PROTOCOLS IN METHODS IN MOLECULAR BIOLOGY, Vol. 66, G. E. Morris, Ed. (1996)).

[0096] As used herein, the terms “antigen-presenting cell” or “APC” refer to a cell that mediate a cellular immune response by displaying an epitope on its outer surface, presented by a protein or protein complex (e.g., a major histocompatibility complex (MHC) or MHC-related protein such as CD1 that can present lipids to T cells), for recognition by an immune cell such as a T cell. APCs include professional APCs, such as dendritic cells, macrophages, Langerhans cells, and B cells, that express both class I and class II MHCs, and non-professional APCs (e.g., nucleated cells) that express only class I MHCs. APCs also include artificial APCs, such as cells (e.g., Drosophila cells) engineered to express a MHC that presents a T cell epitope.

[0097] The term “avidity” as used herein, refers to the binding strength as a function of the cooperative interactivity of multiple binding sites of a multivalent molecule (e.g., a soluble multivalent MHC multimer) with a target molecule. A number of technologies exist to characterize the avidity of molecular interactions including switchSENSE and surface plasmon resonance (Gjelstrup et al. (2012) J. IMMUNOL., 188:1292-1306; Vorup-Jensen (2012) ADV. DRUG. DELIV. REV. 64:1759-1781).

[0098] As used herein a “barcode”, also referred to as an oligonucleotide barcode, is a typically short nucleotide sequence (e.g., about 1, 2, 3, 4, 5, 6, 7, 8, 9, 10, 11, 12, 13, 14 or 15 nucleotides long or longer) that identifies a molecule to which it is conjugated. Barcodes can be used, for example, to identify molecules in a reaction mixture. Barcodes uniquely identify the molecule to which it is conjugated, for example, by performing reverse transcription using primers that each contain a “unique molecular identifier” barcode. In other embodiment, primers can be utilized that contain “molecular barcodes” unique to each molecule. The process of labeling a molecule with a barcode is referred to herein as “barcoding.” A “DNA barcode” is a DNA sequence used to identify a target molecule during DNA sequencing. In some embodiments, a library of DNA barcodes is generated randomly, for example, by assembling oligos in pools. In other embodiments, the library of DNA barcodes is rationally designed in silico and then manufactured.

[0099] “Binding affinity” generally refers to the strength of the sum total of noncovalent interactions between a single binding site of a molecule (e.g., a TCR variable region) and its binding partner. Unless indicated otherwise, as used herein, “binding affinity” refers to intrinsic binding affinity which reflects a 1:1 interaction between members of a binding pair (e.g., TCR and peptide-MHC). The affinity of a molecule X for its partner Y can generally be represented by the dissociation constant (Kd). For example, the Kd can be about 1 μM, 500 nM, 200 nM, 150 nM, 100 nM, 60 nM, 50 nM, 40 nM, 30 nM, 20 nM, 10 nM, 8 nM, 6 nM, 4 nM, 2 nM, 1 nM, or less than 1 nM. A variety of methods of measuring binding affinity are known in the art, any of which can be used for purposes of the present disclosure.

[0100] As used herein, the terms “carrier” refers to a material, composition or vehicle, such as a liquid or solid filler, diluent, excipient, solvent or encapsulating material, involved in carrying or transporting a pharmaceutical agent, or a pharmaceutically acceptable salt thereof, from one organ, or portion of the body, to another organ, or portion of the body. A “pharmaceutically acceptable carrier” includes any and all solvents, dispersion media, coatings, antibacterial and antifungal agents, isotonic and absorption delaying agents, and the like that are physiologically compatible.

[0101] As used herein, the term “cleavage site” or “cleavable moiety” refers to a site, a motif or sequence that is cleavable, such as by an enzyme (e.g., a protease) or by particular reaction conditions. In some embodiments, the cleavage moiety comprises a protein, e.g., enzymatic, cleavage site. In some embodiments, the cleavage moiety comprises a chemical cleavage site, e.g., through exposure to oxidation/reduction conditions, light/sound, temperature, pH, pressure, etc.

[0102] The term administered “in combination,” as used herein, is understood to mean that two (or more) different treatments are delivered to the subject during the course of the subject's affliction with the disorder, such that the effects of the treatments on the patient overlap at a point in time. In certain embodiments, the delivery of one treatment is still occurring when the delivery of the second begins, so that there is overlap in terms of administration. This is sometimes referred to herein as “simultaneous” or “concurrent delivery.” In other embodiments, the delivery of one treatment ends before the delivery of the other treatment begins. In certain embodiments of either case, the treatment is more effective because of combined administration. For example, the second treatment is more effective, e.g., an equivalent effect is seen with less of the second treatment, or the second treatment reduces symptoms to a greater extent, than would be seen if the second treatment were administered in the absence of the first treatment, or the analogous situation is seen with the first treatment. In certain embodiments, delivery is such that the reduction in a symptom, or other parameter related to the disorder is greater than what would be observed with one treatment delivered in the absence of the other. The effect of the two treatments can be partially additive, wholly additive, or greater than additive. The delivery can be such that an effect of the first treatment delivered is still detectable when the second is delivered.

[0103] As used herein, “effective amount” or “therapeutically-effective amount” refers to the amount of an active agent (e.g., a pMHC multimer as provided herein) sufficient to effect beneficial or desired results. An effective amount can be administered in one or more administrations, applications or dosages and is not intended to be limited to a particular formulation or administration route.

[0104] As used herein, the term “expression construct” refers to a vector designed for gene expression, e.g., in a host cell. An expression vector promotes the expression (i.e., transcription/translation) of an encoded polypeptide (e.g., fusion polypeptide). Typically, the vector is a plasmid, although other suitable vectors, including viral and non-viral vectors are also encompassed by the term “expression construct.”

[0105] As used herein, an “IgM constant region” refers to all or a portion of the four constant region domains of immunoglobulin M, referred to as Cμ1, Cμ2, Cμ3 and Cμ4 (each approximately 110 amino acids), including alleles (including the four human IgM constant region alleles), variants and modified forms that retain the functional activity of the naturally-occurring IgM constant region domain(s).

[0106] As used herein, an “IgA constant region” refers to all or a portion of the three constant region domains of immunoglobulin A (isotype A1 or A2), referred to as Cal, Cα2 and Cα3 (each approximately 110 amino acids in length), including alleles (including the three human IgA constant region alleles of A1 or A2), variants and modified forms that retain the functional activity of the naturally-occurring IgA constant region domain(s).

[0107] As used herein, the term “immunoglobulin J chain” refers to an optional accessory protein of IgM or IgA that is not essential for IgM or IgA assembly (polymerization) but that enhances IgM or IgA assembly and plays a role in mucosal secretion and complement activation. An exemplary full-length human J chain has the amino acid sequence shown in SEQ ID NO: 26.

[0108] As used herein, the terms “immunoglobulin tailpiece” or “tailpiece region” refers to a short extension region at the C-terminal end of the constant region of an immunoglobulin, e.g., IgM or IgA (including all alleles thereof). The IgM and IgA tailpieces are typically about 18 amino acid regions at the carboxy terminus, which contain a cysteine that is involved in multimerization of IgM or IgA. Exemplary human IgM and IgA tailpieces have the amino acid sequences shown in SEQ ID NOs: 129 and 130, respectively.

[0109] The use of the term “include,” “includes,” “including,” “have,” “has,” “having,” “contain,” “contains,” or “containing,” including grammatical equivalents thereof, should be understood generally as open-ended and non-limiting, for example, not excluding additional unrecited elements or steps, unless otherwise specifically stated or understood from the context.

[0110] As used herein, the terms “linked,” “conjugated,” “fused,” or “fusion,” are used interchangeably when referring to the joining together of two more elements or components or domains, by whatever means including recombinant or chemical means.

[0111] As used herein, the term “linker sequence” refers to a nucleotide sequence, and corresponding encoded amino acid sequence, or “linker” that serves to link or separate two polypeptides, such as two polypeptide domains of a fusion protein. For example, an intervening linker sequence can serve to provide flexibility and/or additional space between the two polypeptides that flank the linker. A linker sequence also can contain, for example, a protease cleavage site or a ribosomal skipping sequence.

[0112] As used herein, the terms “operatively linked” and “operably linked” are used interchangeably to describe configurations between sequences within an expression construct that allow for particular operations to be carried out. For example, when a regulatory sequence is “operatively linked” to a coding sequence within an expression construct, the regulatory sequence operates to regulate the expression of the coding sequence. Similarly, when a cleavage sequence (site) is “operatively linked” to a peptide sequence within an expression construct, cleavage at the cleavage sequence operates to cleave the peptide sequence away from the rest of the polypeptide encoded by the expression construct. Similarly, when two polypeptides within a fusion protein are “operatively linked”, the sequences encoding the two polypeptides are linked in-frame in an expression construct such that transcription and translation of the construct leads to a contiguous fusion protein comprised of the two polypeptides.

[0113] The term “major histocompatibility complex” or “MHC” refers to a genomic locus containing a group of genes that encode the polymorphic cell-membrane-bound glycoproteins known as MHC class I and class II molecules, which regulate the immune response by presenting peptides of fragmented proteins to CD8⁺ (e.g., cytotoxic) and CD4⁺(e.g., helper) T lymphocytes, respectively. In humans, this group of genes is also called “human leukocyte antigen” or “HLA.” A HLA can be selected from multiple serotypes (e.g., HLA-A*02, HLA-DPA1*02) which each may include multiple alleles (e.g., HLA-A*02:01, HLA-DPA1*02:02). Nucleotide sequences and a gene map of human MHC are publicly available (e.g., The MHC sequencing consortium, (1999) NATURE, 401:921-923.

[0114] The terms “major histocompatibility complex” and “MHC” also refer to the polymorphic glycoproteins encoded by the MHC class I or class II genes, where appropriate in the context, and proteins comprising variants thereof that bind T cell epitopes (e.g., class I or class II epitopes). Such proteins are also referred to as “MHC molecule” or “MHC protein” herein. The terms “MHC class I” or “MHC I” are used interchangeably to refer to protein molecules comprising an α chain composed of three domains (α1, α2 and α3), and a second, invariant β2-microglobulin. The α3 domain is linked to the transmembrane domain, anchoring the MHC class I molecule to the cell membrane. Antigen-derived peptide epitopes, which are located in the peptide-binding groove, in the central region of the α1/α2 heterodimer. MHC Class I molecules such as HLA-A are part of a process that presents short polypeptides to the immune system. These polypeptides are typically 8-11 amino acids in length and originate from proteins being expressed by the cell, which can be endogenous proteins or exogenous proteins (e.g., viral or bacterial proteins, vaccine proteins). MHC class I molecules present antigen to CD8+ cytotoxic T cells. The terms “MHC class II” and “MHC II” are used interchangeably to refer to protein molecules containing an α chain with two domains (α1 and α2) and a β chain with two domains (β1 and β2). The peptide-binding groove is formed by the α1/β1 heterodimer. MHC class II molecules present antigen to specific CD4+ T cells. Antigens delivered endogenously to APCs are processed primarily for association with MHC class I. Antigens delivered exogenously to APCs are processed primarily for association with MHC class II. As used herein, MHC proteins (MHC Class I or Class II proteins) also includes MHC variants which contain amino acid substitutions, deletions or insertions and yet which still bind MHC peptide epitopes (MHC Class I or MHC Class II peptide epitopes). The term “MHC,” “MHC molecule,” or “MHC protein” also includes an extracellular fragment of a full-length MHC protein that retains the ability to bind the cognate epitope, for example, a soluble MHC. As used herein, the term “soluble MHC” refers to an extracellular fragment of a MHC comprising corresponding α1 and α2 domains that bind a class I T cell epitope or corresponding α1 and 31 domains that bind a class II T cell epitope, where the α1 and α2 domains or the α1 and β1 domains are derived from a naturally occurring MHC or a variant thereof.

[0115] The term “MHC protein” also includes MHC proteins of non-human species of vertebrates. MHC proteins of non-human species of vertebrates play a role in the examination and healing of diseases of these species of vertebrates, for example, in veterinary medicine and in animal tests in which human diseases are examined on an animal model, for example, experimental autoimmune encephalomyelitis (EAE) in mice (Mus musculus), which is an animal model of the human disease multiple sclerosis. Non-human species of vertebrates are, for example, and more specifically mice (Mus musculus), rats (Rattus norvegicus), cows (Bos taurus), horses (Equus equus) and green monkeys (Macaca mulatta). MHC proteins of mice are, for example, referred to as H-2-proteins, wherein the MHC class I proteins are encoded by the gene loci H2K, H2L, and H2D and the MHC class II proteins are encoded by the gene loci H2I.

[0116] As used herein, the term “multimer” refers to a plurality (two or more) of units, e.g., a plurality of units comprising an MHC moiety-multimerization moiety fusion. The multimerization moiety is comprised of an immunoglobulin heavy chain constant region, which dimerizes to form the immunoglobulin Fc domain. As used herein, a multimer can be a dimer, a trimer, a tetramer, a pentamer, or a hexamer, with respect to the immunoglobulin Fc domain of the multimer (e.g., corresponding to the Ig Fc region within the multimer). However, since the Fc domain is a dimer and presents two MHC moieties, each unit of the multimer is bivalent (i.e., has two peptide-binding regions) and there will be 2× the number of peptide-binding sites as there are Ig subunits in each multimer. Thus, for example, a “hexamer” multimer comprises twelve peptide-binding sites provided by the MHC moiety and a “pentamer” multimer comprises ten peptide-binding sites provided by the MHC moiety. This is illustrated, for example, in FIGS. 1A-1B, and 1D-FIGS. 4A-4B, which each show exemplary IgM pentamer MHC multimers (i.e., five Ig subunits) having ten peptide-binding sites provided by the MHC moiety or FIGS. 1C, 2C, 3C, and 4C, which each show exemplary IgA dimer MHC multimers.

[0117] As used herein, “percent identity” between a polypeptide sequence and a reference sequence is defined as the percentage of amino acid residues in the polypeptide sequence that are identical to the amino acid residues in the reference sequence, after aligning the sequences and introducing gaps, if necessary, to achieve the maximum percent sequence identity. Similarly, percent “identity” between a nucleic acid sequence and a reference sequence is defined as the percentage of nucleotides in the nucleic acid sequence that are identical to the nucleotides in the reference sequence, after aligning the sequences and introducing gaps, if necessary, to achieve the maximum percent sequence identity. Alignment for purposes of determining percent sequence identity (e.g., amino acid sequence identity or nucleic acid sequence identity) can be achieved in various ways that are within the skill in the art, for instance, using publicly available computer software such as BLAST, BLAST-2, ALIGN, MEGALIGN (DNASTAR), CLUSTALW, CLUSTAL OMEGA, or MUSCLE software. Those skilled in the art can determine appropriate parameters for aligning sequences, including any algorithms needed to achieve maximal alignment over the full length of the sequences being compared.

[0118] As used herein, “pharmaceutical composition” or “pharmaceutical formulation” refers to the combination of an active agent with a carrier, inert or active, making a composition especially suitable for diagnostic or therapeutic use in vivo or ex vivo.

[0119] As used herein, the phrases “pharmaceutically acceptable” and “pharmacologically acceptable,” refer to compounds, molecular entities, compositions, materials, and/or dosage forms that do not produce an adverse, allergic or other untoward reaction when administered to an animal, or a human, as appropriate. For human administration, preparations should meet sterility, pyrogenicity, and general safety and purity standards as required by FDA Office of Biologics standards or its international equivalents. “Pharmaceutically acceptable” and “pharmacologically acceptable” can mean approved or approvable by a regulatory agency of the federal or a state government or the corresponding agency in countries other than the United States, or that is listed in the U.S. Pharmacopoeia or other generally recognized pharmacopoeia for use in animals, and more particularly, in humans.

[0120] As used herein, “pharmaceutically acceptable excipient” refers to a substance that aids administration of an active agent to and/or absorption by a subject and can be included in the compositions of the present invention without causing a significant adverse toxicological effect on the patient. Non-limiting examples of pharmaceutically acceptable excipients include water, NaCl, normal saline solutions, such as a phosphate buffered saline solution, emulsions (e.g., such as an oil/water or water/oil emulsions), lactated Ringer's, normal sucrose, normal glucose, binders, fillers, disintegrants, lubricants, coatings, sweeteners, flavors, salt solutions (such as Ringer's solution), alcohols, oils, gelatins, carbohydrates such as lactose, amylose or starch, fatty acid esters, hydroxymethycellulose, polyvinyl pyrrolidine, and colors, and the like. Such preparations can be sterilized and, if desired, mixed with auxiliary agents such as lubricants, preservatives, stabilizers, wetting agents, emulsifiers, salts for influencing osmotic pressure, buffers, coloring, and/or aromatic substances and the like that do not deleteriously react with the compounds of the invention. For examples of excipients, see, e.g., REMINGTON'S PHARMACEUTICAL SCIENCES, 18th Edition (Easton, Pennsylvania: Mack Publishing Company, 1990.

[0121] As used herein the terms “polypeptide,” “peptide”, and “protein” are used interchangeably herein to refer to a polymer of amino acid residues. The terms apply to amino acid polymers in which one or more amino acid residue is an artificial chemical mimetic of a corresponding naturally occurring amino acid, as well as to naturally occurring amino acid polymers and non-naturally occurring amino acid polymer. The terms “isolated protein” and “isolated polypeptide” are used interchangeably to refer to a protein (e.g., a soluble, multimeric protein) which has been separated or purified from other components (e.g., proteins, cellular material) and/or chemicals. Typically, a polypeptide is purified when it constitutes at least 60 (e.g., at least 65, 70, 75, 80, 85, 90, 92, 95, 97, or 99) % by weight of the total protein in the sample.

[0122] As used herein, “subject” and “patient” are used interchangeably and refer to an organism to be treated by the methods and compositions provided herein. Such organisms are preferably a mammal (e.g., human, mouse, rat, guinea pig, dog, cat, horse, cow, pig, or non-human primate, such as a monkey, chimpanzee, baboon, and rhesus), and more preferably, a human.

[0123] The term “substantial identity” indicates that two amino acid sequences, when optimally aligned and compared, are identical, with appropriate insertions or deletions, in at least about 90% of the amino acids and usually at least about 95% of the amino acids. In various embodiments, the two sequences may be at least 90%, 91%, 92%, 93%, 94%, 95%, 96%, 97%, 98%, 99% or 99.5% identical at the amino acid sequence level.

[0124] As used herein, the term “tag” refers to an additional molecular component that is affixed to a multimer to thereby label it, for example for detection and/or purification purposes. A “tag” encompasses polypeptide or peptide molecules that can serve as detectable labels or targets used in purification e.g., by affinity chromatography (e.g., 6×His, Flag, V5 tags, described further herein). A “tag” also can be an oligonucleotide component, generally DNA, that provides a means of addressing a target molecule (e.g., a multimer) to which it is joined (described further herein).

[0125] As used herein, the term “T cell” refers to a type of white blood cell that can be distinguished from other white blood cells by the presence of a T cell receptor on the cell surface. As will be known to those of skill in the art, there are several subsets of T cells, including, but not limited to, T helper cells (a.k.a. T_{H} cells or CD4⁺ T cells) and subtypes, including T_{H}1, T_{H}2, T_{H}3, T_{H}17, T_{H}9, and T_{FH} cells, cytotoxic T cells (a.k.a. T_{C} cells, CD8⁺ T cells, cytotoxic T lymphocytes, T-killer cells, killer T cells), memory T cells and subtypes, including central memory T cells (T_{CM} cells), effector memory T cells (T_{EM} and T_{EMRA} cells), and resident memory T cells (T_{RM} cells), regulatory T cells (a.k.a. T_{reg} cells or suppressor T cells) and subtypes, including CD4⁺ FOXP3⁺ T_{reg} cells, CD4⁺ FOXP3⁻ T_{reg} cells, Tr1 cells, Th3 cells, and T_{reg}17 cells, natural killer T cells (a.k.a. NKT cells), mucosal associated invariant T cells (MAITs), and gamma delta T cells (γδ T cells), including Vγ9/Vδ2 T cells. The term “T cell cytotoxicity” includes any immune response that is mediated by CD8+ T cell activation.

[0126] As used herein, the terms “T cell receptor” and “TCR” refer to a surface protein (e.g., a heterodimeric protein) of a T cell that allows the T cell to recognize an antigen and/or an epitope thereof, typically presented by a major histocompatibility complex (MHC), or a fragment of such surface protein comprising at least its variable domains. Typically, TCRs are heterodimers comprising two different protein chains. In many T cells, the TCR comprises an alpha (α) chain and a beta (β) chain. Each chain, in its native form, typically comprises two extracellular domains, a variable (V) domain and a constant (C) domain, the latter of which is membrane-proximal. The variable domain of α-chain (Vα) and the variable domain of β-chain (VO) each comprise three hypervariable regions that are also referred to as the complementarity determining regions (CDRs) such as CDR1, CDR2, and CDR3. The CDRs, in particular CDR3, are primarily responsible for contacting epitopes and thus define the specificity of the TCR, although CDR1 of the α-chain can interact with the N-terminal part of the antigen, and CDR1 of the β-chain interacts with the C-terminal part of the antigen. All numbering of the amino acid sequences and designation of protein loops and sheets of TCRs is according to the IMGT numbering scheme (the international ImMunoGeneTics information system; Lefranc et al. (2003) DEV. COMP. IMMUNOL., 27:55 77; Lefranc et al. (2005) DEV. COMP. IMMUNOL., 29:185-203). The terms “T cell receptor” and “TCR” also include an “engineered T cell receptor” or “engineered TCR,” such as a recombinantly modified protein comprising a fragment of a naturally occurring TCR that bind a T cell epitope-MHC complex, or a variant of such fragment. For example, an engineered TCR may contain a modified binding cassette (e.g., where one or more CDR sequences or other elements is modified, for example, by introducing corresponding sequences from a different TCR). For example, the α and/or β chain CDR3 sequences of a first TCR identified herein may be introduced into a second, different TCR present in or derived from a given T cell. The TCR may also contain modification, truncation, or deletion of its constant region, hinge region, transmembrane region, and/or intracellular region. For example, at least the transmembrane region and the intracellular region can be deleted to generate a soluble TCR. According, in certain embodiments, a TCR (e.g., engineered TCR) comprises corresponding Vα and Vβ domains that bind a T cell epitope-MHC complex, where the Vα and Vβ domains are derived from a naturally occurring TCR or a variant thereof.

[0127] As used herein, a “TCR/pMHC complex” refers to a protein complex formed by binding between a T cell receptor (TCR), or a soluble portion thereof, and a peptide-loaded MHC molecule. Accordingly, a “component of a TCR/pMHC complex” refers to one or more subunits of a TCR (e.g., Vα, Vβ, Cα, Cβ), or to one or more subunits of an MHC or pMHC class I or II molecule.

[0128] As used herein, the terms “treat”, “treating” or “treatment” include any effect, for example, lessening, reducing, modulating, ameliorating, inhibiting (such as arresting development, either in a first instance or recurrence), or eliminating, that results in the prevention or improvement of the condition, disease, disorder, and the like, or ameliorating a symptom thereof. Treating can be curing, improving, or at least partially ameliorating (including relieving by regression of a disease state) the disorder. In certain embodiments, treating is curing the disease. As used herein, “reducing” or “reduction” of a symptom or symptoms (and grammatical equivalents of this phrase) means decreasing of the severity or frequency of the symptom(s), or elimination of the symptom(s). Treating includes treatment of a disease in a subject, such as a human.

[0129] As used herein, a “variant” refers to a modified form of the protein or polypeptide in which one or more modifications, such as amino acid swaps, substitutions, deletions and/or insertions, have been made such that the amino acid sequence of the variant differs from the parental amino acid sequence from which it is derived. Thus, a “variant” is derived from a parental protein or polypeptide through introduction of one or more modifications. Typically, a “variant” retains “substantial identity” to the parental protein or polypeptide from which it is derived.

### II. Multimer Components

[0130] The multimers of the disclosure comprise an MHC moiety that is operatively linked to a multimerization moiety. As provided herein, an MHC moiety comprises (i) an MHC Class I molecule, optionally bound with an MHC Class I-binding peptide; or (ii) an MHC Class II molecule, optionally bound with an MHC Class II-binding peptide. In general, the multimerization moiety comprises at least one constant (C) region and a tailpiece region of IgM or IgA. This multimerization moiety mediates polymerization of the fusion protein into multimers, which can be dimers, trimers, tetramers, pentamers, or hexamers. The resultant multimer is a soluble multivalent molecule that can bind to TCRs recognized by the peptide-MHC portion of the multimer. A composition comprising the multimers can comprise a single type of multimer (e.g., only pentamers or only hexamers). Alternatively, a composition comprising the multimers can comprise a mixture of at least two multimers selected from the group consisting of dimers, trimers, tetramers, pentamers, or hexamers (e.g., a mixture of hexamers and pentamers or a mixture of pentamers and dimers).

[0131] Accordingly, in one aspect, the disclosure provides a multimer comprising:
[0132] (a) an MHC moiety comprising (i) an MHC Class I molecule, optionally bound with an MHC Class I-binding peptide; or (ii) an MHC Class II molecule, optionally bound with an MHC Class II-binding peptide; and
[0133] (b) the multimerization moiety comprises (i) an IgM Cμ4 constant region and an IgM tailpiece region; or (ii) an IgA Cα3 constant region and an IgA tailpiece region.

[0134] The multimers optionally can also include an immunoglobulin J chain, an effector/targeting moiety and/or a functional moiety. Non-limiting representative multimer structures are illustrated schematically in FIGS. 1A-D, FIGS. 2A-C, FIGS. 3A-C and FIGS. 4A-C. The various components of the multimers are described in further detail below.

### A. MHC Class I Polypeptides

[0135] MHC Class I molecules are defined and described herein. The Class I histocompatibility ternary complex contains three parts associated by noncovalent bonds. Human MHC class I genes encode, for example, HLA-A, HLA-B, and HLA-C proteins. Class I HLA protein is a heterodimer composed of a heavy α-chain and a smaller β-chain. The α-chain is encoded by a variant HLA gene, and the R chain is an invariant β2 microglobulin (β2m) polypeptide encoded by a separate region of the human genome. The MHCI heavy chain (also referred to herein as the MHCI α chain) is a polymorphic transmembrane glycoprotein of about 45 kDa containing three extracellular domains, each containing about 90 amino acids (α1 at the N-terminus, α2 and α3), a transmembrane domain of about 40 amino acids and a cytoplasmic tail of about 30 amino acids. The α1 and α2 domains of the MHCI heavy chain contain two segments of a helix that form a peptide-binding groove or cleft. A short peptide typically about 8-11 amino acids binds noncovalently (“fits”) into this groove between the two a helices. The α3 domain of the MHCI heavy chain is proximal to the plasma membrane. The MHCI heavy chain is non-covalently bound to a β2 microglobulin (β2m) polypeptide, forming a ternary complex. In MHCI, the binding groove is closed at both ends by conserved tyrosine residues leading to a size restriction of the bound peptides to usually about 8-11 residues with its C-terminal end docking into the F-pocket.

[0136] In one embodiment of a multimer comprising MHCI, the heavy chain and β2m are recombinantly expressed as a single chain molecule, with a flexible linker between the heavy chain and β2m. In one embodiment, a Y84A substitution is introduced into the heavy chain to facilitate formation of the complete MHCI molecule in single chain format. Non-limiting examples of amino acid sequences of single chain format MHCI molecules with the Y84A mutation are shown in SEQ ID NOs: 1, 3, 5, 6, 8, 9, 11, 199-204, 235-237, 248-249, 259-260.

[0137] In accordance with the present disclosure, a suitable MHCI molecule can be that of a vertebrate MHC molecule such as a human, a mouse, a rat, a porcine, a bovine or an avian MHC molecule.

[0138] In some embodiments, the multimeric MHCI multimers described herein comprise an MHC molecule comprising a human MHC class I protein selected from HLA-A, HLA-B or HLA-C. In some embodiments, the multimer comprises MHC Class I-like molecules (including non-classical MHC Class I molecules) including, but not limited to, CD1d, HLA E, HLA G, HLA F, HLA H, MIC A, MIC B, ULBP-1, ULBP-2, and ULBP-3. The amino acid sequences of the MHCI heavy chains, β2m polypeptides and of MHC Class I like molecules from a variety of vertebrate species are known in the art and publicly available.

[0139] In some embodiments, the MHCI heavy chain α domain is human, and comprises, for example, an MHCI heavy chain α domain(s) from a human MHC Class I molecule(s) selected from the group consisting of HLA-A*02:01, HLA-A*01:01, HLA-A*03:01, HLA-A*11:01, HLA-A*24:02, HLA-B*07:02, HLA-C*04:01, HLA-C*07:02, HLA-B*08:01, HLA-B*35:01, HLA-B*57:01, HLA-B*57:03, HLA-E, HLA-C*16:01, HLA-C*08:02, HLA-C*07:01, HLA-C*05:01, HLA-B*44:02, HLA-A*29:02, HLA-B*44:03, HLA-C*03:04, HLA-B*40:01, HLA-C*06:02, HLA-B*15:01, HLA-C*03:03, HLA-A*30:01, HLA-B*13:02, HLA-C*12:03, HLA-A*26:01, HLA-B*38:01, HLA-B*14:02, HLA-A*33:01, HLA-A*23:01, HLA-A*25:01, HLA-B*18:01, HLA-B*37:01, HLA-B*51:01, HLA-C*14:02, HLA-C*15:02, HLA-C*β2:02, HLA-B*27:05, HLA-A*31:01, HLA-A*30:02, HLA-B*42:01, HLA-C*17:01, HLA-B*35:02, HLA-B*39:06, HLA-C*03:02, HLA-B*58:01, HLA-A*33:03, HLA-A*68:02, HLA-C*01:02, HLA-C*07:04, HLA-A*68:01, HLA-A*32:01, HLA-B*49:01, HLA-B*53:01, HLA-B*50:01, HLA-A*02:05, HLA-B*55:01, HLA-B*45:01, HLA-B*52:01, HLA-C*12:02, HLA-B*35:03, HLA-B*40:02, HLA-B*15:03, HLA-A*74:01, HLA-A*02:02, HLA-A*02:06, HLA-A*68:03 and/or HLA-C*08:01. The amino acid sequences of soluble forms of these MHCI molecules (lacking signal sequence and transmembrane domain) are shown in SEQ ID NOs: 30-96, and 261-264 respectively.

[0140] In some embodiments, the MHCI multimers provided herein comprise the α1 and α2 domains of an MHCI heavy chain. In some embodiments, MHCI multimers provided herein comprise the α1, α2, and α3 domains of an MHCI heavy chain.

[0141] In some embodiments, the two or more pMHCI or pMHCI-like polypeptides in an MHCI multimer comprise a β2-microglobulin polypeptide, e.g., a human β2-microglobulin. In some embodiments, the β2-microglobulin is wild-type human β2-microglobulin. In some embodiments, the β2-microglobulin comprises an amino acid sequence that is at least 80, 85, 90, 95, or 99% identical to the amino acid sequence of the human 32 microglobulin, the full-length sequence of which is set forth in SEQ ID NO: 25 (UniProt Id. No. P61769).

[0142] In some embodiments, the multimeric protein comprises a soluble MHCI polypeptide. In some embodiments the MHC multimeric protein comprises a soluble MHCI α domain and a β2-microglobulin polypeptide. In some embodiments, the soluble MHCI protein comprises the MHCI heavy chain α1 domain and the MHCI heavy chain α2 domain.

[0143] Other embodiments of the MHC moiety are composed only of the MHCI heavy chain and β2-microglobulin, without loaded peptide, referred to herein as “empty” MHCI.

[0144] Alternatively, in some embodiments, the MHCI monomer is a fusion protein comprising a β2m polypeptide or functional fragment thereof covalently linked to the MHCI heavy chain or functional fragment thereof. In some embodiments the carboxy (—COOH) terminus of β2m is covalently linked to the amino (—NH₂) terminus of the MHCI heavy chain.

[0145] In some embodiments, the MHC monomers comprise one or more linkers between the individual components of the MHCI monomer. In some embodiments, the MHCI monomer comprises a heavy chain fused with β2m through a linker. In some embodiments, the linker between the heavy chain and β2m is a flexible linker, e.g., made of glycine and serine. In some embodiments, the flexible linker between the heavy chain and β2m is between 5-20 residues long. In other embodiments, the linker between the heavy chain and β2m is rigid with a defined structure, e.g. made of amino acids like glutamate, alanine, lysine, and leucine. In one embodiment, the linker is a (G₄S)₄ linker (SEQ ID NO: 141).

### B. MHC Class II Polypeptides

[0146] MHC class II molecules are defined and described herein. Human MHC class II genes encode, for example, HLA-DM, HLA-DO, HLA-DP, HLA-DQ, and HLA-DR proteins. Class II HLA protein is a heterodimer composed of a and β chains both encoded by variant HLA genes. The antigen binding groove is where a peptide epitope binds. Since the antigen binding groove of MHC class II molecules is open at both ends, the groove can accommodate longer peptide epitopes than MHC class I molecules. Peptide epitopes presented by MHC class II molecules typically are about 15-24 amino acid residues in length.

[0147] MHCII molecules of the present disclosure can be vertebrate MHCII molecules such as a human, a mouse, a rat, a porcine, a bovine or an avian MHCII molecule. In some embodiments, the multimeric MHCII multimers described herein comprise an MHC molecule comprising a human MHC class II protein selected from HLA-DR, HLA-DQ, HLA-DX, HLA-DO, HLA-DZ, and HLA-DP. The amino acid sequences of the MHCII α and β chains from a variety of vertebrate species, including humans, are known in the art and publicly available.

[0148] In some embodiments, the human MHCII molecule is of an allotype selected from the group consisting of DRB1*0101 (see, e.g., Cameron et al. (2002) J. IMMUNOL. METHODS, 268:51-69; Cunliffe et al. (2002) EUR. J. IMMUNOL., 32:3366-3375; Danke et al. (2003) J. IMMUNOL., 171:3163-3169), DRB1*1501 (see, e.g., Day et al. (2003) J. CLIN. INVEST, 112:831-842), DRB5*0101 (see, e.g., Day et al., ibid), DRB1*0301 (see, e.g., Bronke et al. (2005) HUM. IMMUNOL., 66:950-961), DRB1*0401 (see, e.g., Meyer et al. (2000) PROC. NATL. ACAD. SCI. USA, 97:11433-11438; Novak et al. (1999) J. CLIN. INVEST, 104:R63-R67; Kotzin et al. (2000) PROC. NATL. ACAD. SCI. USA, 97:291-296), DRB1*0402 (see, e.g., Veldman et al. (2007) CLIN. IMMUNOL., 122:330-337), DRB1*0404 (see, e.g., Gebe et al. (2001) J. IMMUNOL., 167:3250-3256), DRB1*1101 (see, e.g., Cunliffe, ibid; Moro et al. (2005) BMC IMMUNOL., 6:24), DRB1*1302 (see, e.g., Laughlin et al. (2007) INFECT. IMMUNOL. 75:1852-1860), DRB1*0701 (see, e.g., Danke, ibid), DQA1*0102 (see, e.g., Kwok et al. (2000) J. IMMUNOL., 164:4244-4249), DQB1*0602 (see, e.g., Kwok, ibid), DQA1*0501 (see, e.g., Quarsten et al. (2001) J. IMMUNOL., 167:4861-4868), DQB1*0201 (see, e.g., Quarsten, ibid), DPA1*0103 (see, e.g., Zhang et al. (2005) EUR. J. IMMUNOL., 35:1066-1075; Yang et al. (2005) J. CLIN. IMMUNOL., 25:428-436), and DPB1*0401 (see, e.g., Zhang, ibid; Yang, ibid).

[0149] In some embodiments, the MHCII molecule is human, and comprise, for example, an MHCII α and β chains selected from the group consisting of HLA-DRA*01:01, HLA-DRB1*01:01, HLA-DRB1*01:02, HLA-DRB1*03:01, HLA-DRB1*04:01, HLA-DRB1*04:04, HLA-DRB1*07:01, HLA-DRB1*08:01, HLA-DRB1*10:01, HLA-DRB1*11:01, HLA-DRB1*11:04, HLA-DRB1*13:01, HLA-DRB1*13:02, HLA-DRB1*14:01, HLA-DRB1*15:01, HLA-DRB1*15:03, HLA-DQA1*01:01, HLA-DQB1*05:01, HLA-DQA1*01:02, HLA-DQB1*06:02, HLA-DQA1*03:01, HLA-DQB1*03:02, HLA-DQA1*05:01, HLA-DQB1*02:01, HLA-DQB1*03:01, HLA-DQB1*03:03, HLA-DQB1*04:02, HLA-DQB1*05:03, HLA-DQB1*06:03, HLA-DQB1*06:04 HLA-DRB1*04:03, HLA-DRB1*04:07, HLA-DRB1*08:02, HLA-DRB1*09:01, HLA-DRB1*12:01, HLA-DRB1*13:03, HLA-DRB1*15:02, HLA-DRB5*01:01, HLA-DPA1*01:03, and/or HLA-DPB1*04:01. The amino acid sequences of soluble forms of these MHCII chains (lacking signal sequence and transmembrane domain) are shown in SEQ ID NOs: 97-126, respectively. HLA-DR sequences are shown in SEQ ID NOs: 97-112 and 265-272. HLA-DQ sequences are shown in SEQ ID NOs: 113-126 and HLA-DP sequences are shown in SEQ ID NOs: 273-274.

[0150] In certain embodiments, an additional amino acid sequence can be appended to the C-terminal sequence of the α or β chain of the MHCII molecule, for example for purposes of labeling and/or for attaching a moiety that mediates attachment (e.g., conjugation) to the multimerization domain. For example, an avitag (that mediates binding through the biotin binding site of Sav) can be appended, such as an avitag with a Myc tag (SEQ ID NO: 149), an avitag with a Myc tag and a His tag (SEQ ID NO: 150) or an avitag with a His tag and a FLAG tag (SEQ ID NO: 151).

[0151] In certain embodiments, heterodimerization pairs can be appended to the C-terminal sequence of the α and/or β chains of the MHCII molecule. Non-limiting examples of such heterodimerization pair sequences include Fos and Jun (e.g., having the amino acid sequences shown in SEQ ID NOs: 152 and 153, respectively), acidic and basic leucine zippers (e.g., having the amino acid sequences shown in SEQ ID NOs: 154 and 155, respectively), knob and hole sequences (e.g., having the amino acid sequences shown in SEQ ID NOs: 156 and 157, respectively) for knobs-into-holes technology or spytag and spycatcher sequences (e.g., having the amino acid sequences shown in SEQ ID NOs: 158 and 159, respectively). The use of leucine zippers with MHC Class II is described further in Voller and Stem (2008) IMMUNOLOGY 123:305-313, and demonstrated as part of an exemplary construct herein as set forth in Example 3 using a Fos/Jun variant as described in Mason J M et al. (2006) PROC NATL ACAD SC USA, 13; 103(24):8989-94). Additional heterodimerization pairs can include designed coiled-coils with increased affinity and stability, such as FosW, which is a variants of wild type Fos, described in Mason et al. (2006) PROC. NATL. ACAD. SC. USA, 103:8989-8994. Exemplary constructs incorporating a heterodimerization motif into MHC II α and β are shown in FIGS. 5F-5I.

[0152] Typically, an MHCII-binding peptide is encoded in the expression construct adjacent to the coding sequences of the MHCII chains such that the peptide and a digestible linker are encoded in the construct (e.g., upstream of (N-terminally)) and in operative linkage with the coding sequences for the MHCII chain. In certain embodiments, an expression tag is also encoded upstream or downstream of the peptide. Non-limiting examples of such tags include a FLAG tag (e.g., having the amino acid sequence shown in SEQ ID NO: 143), a 6×His tag (e.g., having the amino acid sequence shown in SEQ ID NO: 144), a V5 tag (e.g., having the amino acid sequence shown in SEQ ID NO: 145), a Strep-Tag (e.g., having the amino acid sequence shown in SEQ ID NO: 146), a Protein C tag (e.g., having the amino acid sequence shown in SEQ ID NO: 147) and/or a Myc tag (e.g., having the amino acid sequence shown in SEQ ID NO: 148).

[0153] In some embodiments, in constructs comprising a heterodimerization moiety, a flexible linker may precede and/or follow the moiety. In some embodiments, in constructs comprising a heterodimerization moiety, there may be no linker preceding and/or following the moiety.

[0154] In some embodiments, the pMHCII multimers described herein comprise the α1 and α2 domains of an MHCII α chain and the β1 and β2 domains of an MHCII β chain. In some embodiments, the multimer described herein comprises only the α1 and β31 domains of an MHCII heavy chain. In other embodiments, the pMHCII multimers comprise an α-chain and a β-chain combined with a peptide. Other embodiments include an MHCII molecule comprised only of α-chain and β-chain (so-called “empty” MHC II without loaded peptide), a truncated α-chain (e.g. the α1 domain) combined with full-length β-chain, either empty or loaded with a peptide, a truncated β-chain (e.g. the β1 domain) combined with a full-length α-chain, either empty or loaded with a peptide, or a truncated α-chain combined with a truncated β-chain (e.g. α1 and β1 domain), either empty or loaded with a peptide.

[0155] In some embodiments, the multimeric protein comprises a soluble MHCII polypeptide, which can be a soluble MHCII lacking transmembrane and intracellular domains.

### C. Multimerization Moiety

[0156] The multimerization moiety portion of the multimer comprises at least one region (domain) from IgM or IgA sufficient such that multimerization occurs. In various embodiments, at least the most C-terminal constant region of either an IgM or IgA molecule (Cμ4 or Cα3, respectively) is used in the multimerization moiety, as well as a tailpiece region from either IgM or IgA. A constant region or a plurality of constant regions from IgM can be paired with a tailpiece region from either IgM or IgA. Likewise, a constant region(s) from IgA can be paired with a tailpiece region from either IgM or IgA. In some embodiments, the multimerization moiety can include one, two, three or four C regions from IgM or IgA (as described further below). In some embodiments, the multimerization moiety uses only the IgM or IgA tailpiece region without any constant regions.

[0157] The native IgM constant region contains four distinct constant region domains, Cμ1, Cμ2, Cμ3, and Cμ4, each approximately 110 amino acids in length. Human IgM has four alleles and the constant region sequences from any of these four alleles can be used in the multimers. The constant region also includes an 18 amino acid “tailpiece”, the amino acid sequence of which in humans is shown in SEQ ID NO: 129. The predominant native form of human IgM is a pentamer, although hexamers can also form. However, hexameric IgM does not contain a J chain (the presence of a J chain prevents hexamer formation), whereas pentameric IgM may or may not include a J chain. The Cμ2 and Cμ3 domains and the tailpiece each include a cysteine that form a disulfide bond with another β chain. Deletion of the tailpiece has been shown to prevent the formation of polymeric IgM (Davis et al. (1989) J. IMMUNOL., 43:1352-1357).

[0158] Accordingly, in one embodiment, the multimerization moiety comprises an IgM Cμ4 constant region and an IgM or IgA tailpiece region.

[0159] In one embodiment, the multimerization moiety contains one additional IgM C region. Thus, the multimerization moiety can comprise (i) IgM Cμ3 and Cμ4 constant regions and IgM or IgA tailpiece region, (ii) IgM Cμ2 and Cμ4 constant regions and IgM or IgA tailpiece region or (iii) IgM Cμ1 and Cμ4 constant regions and IgM or IgA tailpiece region.

[0160] In one embodiment, the multimerization moiety contains two additional IgM C regions. Thus, the multimerization moiety can comprise (i) IgM Cμ2, Cμ3 and Cμ4 constant regions and IgM or IgA tailpiece region, (ii) IgM Cμ1, Cμ3 and Cμ4 constant regions and IgM or IgA tailpiece region or (iii) IgM Cμ1, Cμ2 and Cμ4 constant regions and IgM or IgA tailpiece region.

[0161] In one embodiment, the multimerization moiety contains three additional IgM C regions, namely IgM Cμ1, Cμ2, Cμ3 and Cμ4 constant regions and IgM or IgA tailpiece region.

[0162] The native IgA constant region contains three distinct constant region domains, Cal, Cα2 and Cα3. Human IgA has two isotypes, A1 and A2, each of which have three alleles. The constant region sequences from any of these six alleles (three from A1 and three from A2) can be used in the multimers. The IgA constant region also includes an 18 amino acid “tailpiece”, the amino acid sequence of which in humans is shown in SEQ ID NO: 130. The predominant native form of human IgA is a dimer, facilitated by the J chain, although it can also exist naturally as a monomer.

[0163] Accordingly, in one embodiment, the multimerization moiety comprises an IgA Cα3 constant region and an IgA or IgM tailpiece region.

[0164] In one embodiment, the multimerization moiety contains one additional IgA C region. Thus, the multimerization moiety can comprise (i) IgA Cα2 and Cα3 constant regions and IgA or IgM tailpiece region or (ii) IgA Cal and Cα3 constant regions and IgA or IgM tailpiece region.

[0165] In one embodiment, the multimerization moiety contains two additional IgA C regions, namely IgA Cal, Cα2 and Cα3 constant regions and IgA or IgM tailpiece region.

[0166] As used herein, a “multimerization moiety” is intended to encompass variants, mutants and otherwise modified forms of the IgM or IgA constant region sequences that still retain the polymerization ability of the IgM or IgA constant region sequences from which the modified form is derived. Such variants include modifications to eliminate N-linked glycosylation motifs, modifications that substitute a non-cysteine residue with a cysteine residue to thereby improve stability by introducing additional disulfide bonds, modifications that substitute a cysteine residue with a non-cysteine residue to eliminate disulfide bonds, variants with improved half-life or other pharmacokinetic property, variants with increased or decreased effector function (e.g., to alter complement activation or neutrophil activation) or variants that enhance the manufacturability of the multimer.

[0167] Specific modifications of Ig constant regions that alter effector function have been described in the art and can be applied to the multimerization moiety of the multimer to, e.g., alter disulfide bridging, alter half-life or alter complement activation ability. For instance, modification such as substitutions at certain amino acid positions may be used to impact certain activities (e.g., complement dependent cytotoxicity, or FcuR binding). For example, as is known to those of skill in the art, mutations in residues 309-316, based on the sequential Fc numbering scheme present at Uniprot Ref. ID P01871, can be introduced into an IgM C region to minimize complement-dependent cytotoxicity (CDC) (see e.g., WO2018/187702A2; see also Sharp et al., (2019) PROC. NATL. ACAD. SCI. USA, 116: 11900-11905, reporting DLPSP residues 432-436 (residues 309-313 using UniProt P01871 numbering) are critical for C1 complement protein binding). An additional example, as is known to those of skill in the art, is described as a P311G mutation which can be introduced into an IgM C region to minimize CDC (see e.g., Chen et al. (2020) MABS, 12:1818436). Exemplary IgM C region sequences with mutations to minimize complement activation include SEQ ID NOS: 193-198. Exemplary peptide HLA-IgM complement-reduced sequences are set forth in SEQ ID NOs.: 199-204.

[0168] Other modifications such as mutations at Q387R can be introduced to reduce binding to FcuR receptors (Nyambora, et al. (2020) BBA PROTEINS AND PROTEOMICS, 1868: 140266). Additional constant region modifications to increase half-life and/or reduce binding to FcuR receptor are known in the art and include those described in U.S. Patent Publication 20200239572.

### D. MHC Binding Peptides

[0169] In certain embodiments of methods and constructs provided herein, MHC multimer expression constructs encode an MHC-binding peptide that binds to the MHC molecule also encoded by the construct such that upon expression in a host cell, MHC molecules loaded with peptide are expressed by the host cell. For example, in one embodiment, the peptide can be a placeholder peptide that is known to bind the MHC molecule used in the multimer. Methods for peptide exchange are known in the art, for example, including for Class I: UV-mediated cleavage (Rodenko et al., NATURE PROTOCOLS 1:1120-1132, 2006), dipeptide exchange (Saini et al., (2015) PROC. NATL. ACAD. SCI. USA, 112:202-207), TAPBPR-mediated exchange (Overall et al., (2020) NATURE COMM., 11:1909), or for Class II, exchange under acidic conditions as in Day et al., (2003) J. CLIN. INVEST., 112:831-842. In another embodiment, the peptide can be a peptide of interest or epitope peptide that is known to be involved in a disease or disorder, which can be incorporated in a multimer to be used for therapeutic purposes.

[0170] In some embodiments, a peptide may be linked (e.g., covalently linked) to β2m via a linker. For example, in some embodiments, a cognate peptide may be covalently linked to an MHC class I molecule via a flexible linker to β2m. In other embodiments, an MHC Class II molecule (e.g., α or β) may be linked to a cognate peptide via a flexible linker.

[0171] For example, in some embodiments, the present disclosure provides multimers comprising a Major Histocompatibility Complex (MHC) moiety operatively linked to a multimerization moiety, wherein the MHC moiety comprises an MHC molecule bound with a cognate peptide. To give but one example, in some embodiments, the present disclosure provides a multimer comprising an MHC moiety operatively linked to a multimerization moiety, wherein: (a) the MHC moiety comprises an MHC molecule; and (b) the multimerization moiety comprises (i) an IgM Cμ4 constant region and a tailpiece region; or (ii) an IgA Cα3 constant region and a tailpiece region, wherein the tailpiece region in (b)(i) or (b)(ii) is an IgM tailpiece region or an IgA tailpiece region.

[0172] In an alternative embodiment, “empty” MHC multimers are prepared (e.g., as provided herein, by modifying certain amino acid residues to stabilize an empty MHC) and then subsequently loaded with peptide by methods known in the art.

[0173] In some embodiments, an MHC moiety may comprise an MHC molecule optionally bound with a cognate peptide. For example, in some such embodiments, a peptide may be bound in a covalent manner, or a non-covalent manner. In some such embodiments, covalent or non-covalent binding may be accomplished via a linker. In some embodiments, no peptide is bound. For example, as described herein, the present disclosure contemplates that, in some embodiments, an “empty” stabilized MHCI peptide could be used to make an “empty” IgM multimer in which a peptide could be exogenously loaded.

[0174] In some embodiments, the peptide of the multimer is thermolabile. In some embodiments, the peptide is thermolabile at a temperature between about 30-37° C. In some embodiments, the peptide is labile at a temperature at or above 30° C., at or above 32° C., at or above 34° C., at or above 35° C., at or above 36° C., or at about 37° C. Thermal labile peptides and methods of identifying and producing thermal labile peptides have been described (e.g., WO 93/10220; WO 2005/047902; U.S. Patent Publication 2008/0206789; Luimstra et al. (2019) CURR. PROTOC. IMMUNOL., 126(1):e85; Luimstra et al. (2018) J. EXP. MED., 215(5):1493-1504).

[0175] In some embodiments the peptide is labile at an acidic pH. In some embodiments, the peptide is labile between about pH 2.5 and 6.5. In some embodiments, the peptide is labile at a pH of about 2.5-6.0, 3.0-6.0, 3.0-6.5, 3.5-6.0 3.5-6.5, 4.0-6.0, 4.0-6.5, 4.5-6.0, 4.5-6.5, 5.0-6.0, 5.0-6.5, 5.0, 5.5, 6.0 or 6.5. In some embodiments, the peptide is labile at a basic pH. In some embodiments, the peptide is labile between about pH 9-11. In some embodiments, the peptide is labile at or above pH 9, at or above pH 9.5, at or about pH 10, at or about pH 10.5, or at or about pH 11. Methods of generating and using pH sensitive peptides are described in WO 93/10220; U.S. Patent Publication 2008/0206789; and Cameron et al. (2002) J. IMMUNOL. METH., 268:51-69.

[0176] In some embodiments, the peptide comprises a cleavable moiety. Various types of cleavable moieties are known in the art and include, for example, moieties that are cleaved by photoirradiation, enzymes, nucleophilic or electrophilic agents, reducing and oxidizing reagents (e.g., reviewed in Leriche et al. (2012) BIORG. MED. CHEM., 20(2):571-582).

[0177] In some embodiments, the peptide comprises a chemoselective moiety. In some embodiments, the chemoselective moiety comprises a sodium dithionite sensitive azobenzene linker, wherein the azobenzene comprises at least one aromatic group comprising an electron-donor group and is located between two amino acid residues. Azobenzine linkers and methods for chemoselective peptide exchange are known in the art, for example, as described in U.S. Pat. No. 10,400,024.

[0178] In some embodiments, the peptide comprises a cleavable moiety that is cleaved upon exposure to an aminopeptidase. In some embodiments, the cleavage of the amino acid residue occurs via the use of a methionine aminopeptidase. The methionine aminopeptidase can cleave a methionine from a peptide when the amino acid residue at position two is, for example, glycine, alanine, serine, cysteine, or proline. In some embodiments, the cleavable moiety comprises a thrombin cleavage domain.

### 1. MHC Class I Peptides

[0179] For MHCI multimers, MHCI monomers typically are expressed such that they are loaded with a peptide to facilitate proper folding of the MHCI monomers to produce peptide-loaded MHCI (p*MHCI) within the multimers. Examples of placeholder peptides and methods of inducing folding MHCI heavy chains and β2-microglobulin in vitro in the presence of a placeholder peptide have been described in the art (e.g., Bakker et al. (2008) PROC. NATL. ACAD. SCI. USA, 105:3825-3830; Rodenko et al. (2006) NAT. PROT., 1: 1120-1132).

[0180] In some embodiments, the MHCI-binding peptide is an HLA-A, HLA-B or HLA-C peptide. In some embodiments, the peptide is an HLA-A1 peptide (e.g., A1:01 binding peptide). In some embodiments, the peptide is an HLA-A2 peptide (e.g., A02-01 binding peptide). In other embodiments, the peptide is an HLA-A3 peptide (e.g., A3:01 binding peptide), an HLA-A11 peptide (e.g., A11:01 binding peptide), an HLA-A24 peptide (e.g., A24:02 binding peptide), an HLA-B7 peptide (e.g., B7:02 binding peptide), an HLA-B8 peptide (e.g., B8:01 binding peptide), an HLA-B15 peptide (e.g., B15:01 binding peptide), an HLA-B35 peptide (e.g., B35:01 binding peptide), an HLA-B40 peptide (e.g., B40:01 binding peptide), an HLA-B58 peptide (e.g., B58:01 binding peptide), an HLA-C3 peptide (e.g., C3:04 binding peptide), an HLA-C4 peptide (e.g., C4:01 binding peptide), an HLA-C7 peptide (e.g., C7:02 binding peptide), an HLA-C8 peptide (e.g., C8:01 binding peptide), an HLA-B57 peptide (e.g., B57:01 binding peptide or B57:03 binding peptide), an HLA-E peptide (e.g., HLA-E binding peptide), an HLA-C16 peptide (e.g., C16:01 binding peptide), an HLA-C08 peptide (e.g., C08:02 binding peptide), an HLA-C07 peptide (e.g., C07:01 binding peptide), an HLA-C05 peptide (e.g., C05:01 binding peptide), an HLA-B44 peptide (e.g., B44:02 binding peptide), an HLA-A29 peptide (e.g., A29:02 binding peptide), an HLA-B44 peptide (e.g., B44:03 binding peptide), an HLA-C06 peptide (e.g., C06:02 binding peptide), an HLA-C03 peptide (e.g., C03:03 binding peptide), an HLA-A30 peptide (e.g., A30:01 binding peptide), an HLA-B13 peptide (e.g., B13:02 binding peptide), an HLA-C12 peptide (e.g., C12:03 binding peptide), an HLA-A26 peptide (e.g., A26:01 binding peptide), an HLA-B38 peptide (e.g., B38:01 binding peptide), an HLA-B14 peptide (e.g., B14:02 binding peptide), an HLA-A33 peptide (e.g., A33:01 binding peptide), an HLA-A23 peptide (e.g., A23:01 binding peptide), an HLA-A25 peptide (e.g., A25:01 binding peptide), an HLA-B18 peptide (e.g., B18:01 binding peptide), an HLA-B37 peptide (e.g., B37:01 binding peptide), an HLA-B51 peptide (e.g., B51:01 binding peptide), an HLA-C14 peptide (e.g., C14:02 binding peptide), an HLA-C15 peptide (e.g., C15:02 binding peptide), an HLA-Cβ2 peptide (e.g., Cβ2:02 binding peptide), an HLA-B27 peptide (e.g., B27:05 binding peptide), an HLA-A31 peptide (e.g., A31:01 binding peptide), an HLA-A30 peptide (e.g., A30:02 binding peptide), an HLA-B42 peptide (e.g., B42:01 binding peptide), an HLA-C17 peptide (e.g., C17:01 binding peptide), an HLA-B35 peptide (e.g., B35:02 binding peptide), an HLA-B39 peptide (e.g., B39:06 binding peptide), an HLA-C03 peptide (e.g., C03:02 binding peptide), an HLA-A33 peptide (e.g., A33:03 binding peptide), an HLA-A68 peptide (e.g., A68:02 binding peptide), an HLA-C01 peptide (e.g., C01:02 binding peptide), an HLA-C07 peptide (e.g., C07:04 binding peptide), an HLA-A68 peptide (e.g., A68:01 binding peptide), an HLA-A32 peptide (e.g., A32:01 binding peptide), an HLA-B49 peptide (e.g., B49:01 binding peptide), an HLA-B53 peptide (e.g., B53:01 binding peptide), an HLA-B50 peptide (e.g., B50:01 binding peptide), an HLA-A02 peptide (e.g., A02:05 binding peptide), an HLA-B55 peptide (e.g., B55:01 binding peptide), an HLA-B45 peptide (e.g., B45:01 binding peptide), an HLA-B52 peptide (e.g., B52:01 binding peptide), an HLA-C12 peptide (e.g., C12:02 binding peptide), an HLA-B35 peptide (e.g., B35:03 binding peptide), an HLA-B40 peptide (e.g., B40:02 binding peptide), an HLA-B15 peptide (e.g., B15:03 binding peptide), an HLA-A74 peptide (e.g., A74:01 binding peptide), an HLA-A02 peptide (e.g., A02:02 binding peptide), an HLA-A02 peptide (e.g., A02:06 binding peptide), and/or an HLA-A68 peptide (e.g., A68:03 binding peptide). In some embodiments, the peptide is a synthetic peptide.

[0181] In some embodiments, the MHCI molecule is an HLA-A*02:01 molecule and the peptide is an HLA-A*02:01-restricted peptide. In one embodiment, the HLA-A*02:01-restricted peptide is a CMV pp65 peptide epitope. In one embodiment, the CMV pp65 peptide epitope comprises the amino acid sequence NLVPMVATV (SEQ ID NO: 19). In some embodiments, the CMV pp65 peptide epitope consists of the amino acid sequence NLVPMVATV (SEQ ID NO: 19). Other HLA-A*02:01-restricted peptide sequences include the heteroclitic MART-1 sequence ELAGIGILTV (SEQ ID NO: 20), the HPV sequence YMLDLQPETT (SEQ ID NO: 160), the HSV sequence SLPITVYYA (SEQ ID NO: 161) and the WT-1 sequence RMFPNAPYL (SEQ ID NO: 162).

[0182] In other embodiments, the HLA-A2 peptide is KILGFVFTV (SEQ ID NO: 163) or GILGFVFTL (SEQ ID NO: 164). In yet other embodiments, the MHCI/peptide combination can be selected from the group consisting of A*1:01, VTEHDTLLY (SEQ ID NO: 165); A*3:01, TVRSHCVSK (SEQ ID NO: 166); A*11:01, TTFLQTMLR (SEQ ID NO: 167); A*24:02, RYPLTFGWCF (SEQ ID NO: 168); B*7:02, RPHERNGFTVL (SEQ ID NO: 169); B*35:01, IPSINVHHY (SEQ ID NO: 170); C*3:04, FVYGGSKTSL (SEQ ID NO: 171), B*8:01, FLRGRAYGL (SEQ ID NO: 172); C*7:02, RYRPGTVAL (SEQ ID NO: 173); C*4:01, QYDPVAALF (SEQ ID NO: 174); B*15:01, GQFLTPNSH (SEQ ID NO: 175); B*40:01, KEVNSQLSL (SEQ ID NO: 176); B*58:01, VSFIEFVGW (SEQ ID NO: 177); and C*8:02, IAPWYAFAL (SEQ ID NO: 178).

[0183] In some embodiments, the peptide is a dipeptide. In some embodiments, the dipeptide binds to the F pocket of the MHCI binding groove. In some embodiments, the second amino acid of the dipeptide is hydrophobic. In some embodiments, the dipeptide is selected from the group consisting of glycyl-leucine (GL), glycyl-valine (GV), glycyl-methionine (GM), glycyl-cyclohexylalanine (GCha), glycyl-homoleucine (GHle) and glycyl-phenylalanine (GF). Methods for producing and using dipeptides as placeholder peptides are publicly available, for example, as described in Saini et al. (2015) PROC. NATL. ACAD. SCI. USA, 112:202-207.

[0184] In some embodiments, the peptide further comprises a detectable label. In some embodiments, the detectable label is a fluorescent label. In some embodiments, the fluorescent label is attached to a cysteine residue in the peptide.

### 2. MHC Class II Peptides

[0185] In accordance with the present disclosure, MHCII multimers comprise MHCII monomers, which monomers are typically expressed such that they are loaded with an MHCII-binding peptide to facilitate proper folding of the MHCII monomers to produce peptide loaded MHCII (p*MHCII) within the multimers. In various embodiments, the peptide is a peptide that binds HLA-DR, HLA-DQ, HLA-DX, HLA-DO, HLA-DZ or HLA-DP. In some embodiments, the peptide is a synthetic peptide.

[0186] In one embodiment, the MHCII placeholder peptide is a CLIP peptide, such as having the amino acid sequence PVSKMRMATPLLMQA (SEQ ID NO: 22). In one embodiment, the CLIP peptide is cleavable. In one embodiment, the MHCII monomers are synthesized with the cleavable CLIP peptide covalently attached, such as by synthesis of single-chain MHC class II chain-peptide complexes, directed by engineering peptide-specific complementary DNA (cDNA) sequences proximal to the β-chain cDNA (see e.g., Day et al. (2003) J. CLIN. INVEST., 112:831-842). Cleavage of the covalent linkage between the CLIP peptide (as the placeholder peptide) and MHCII thus allows for peptide exchange with other MHCII-binding peptides.

[0187] Other MHCII binding peptides have been described in the art that can be used, based on appropriate pairing of an MHCII molecule and its known MHCII binding peptide. Non-limiting examples of known MHCII molecule/MHCII binding peptide pairs include: DRA1*0101/DRB1*0401 and the immunodominant peptide of hemagglutinin, HA₃₀₇₋₃₁₉ (see Novak et al. (1999) J. CLIN. INVEST., 104:R63-R67) and HLA-DR*1101 and tetanus-toxoid (TT)-derived β2 peptide (TT₈₃₀₋₈₄₄) (see Cecconi et al. (2008) CYTOMETRY, 73A:1010-1018).

### E. Immunoglobulin J Chain

[0188] In certain embodiments, a multimer includes an immunoglobulin J chain (also referred to herein simply as a “J chain”). As provided herein, a J chain contains eight cysteine residues, two of which link the Cμ chains of IgM or the Cα chains of IgA via disulfide bridges. The J chain is not essential for polymerization of either IgM or IgA and thus is not a required component for multimerization of a multimer to occur. However, the J chain can enhance multimerization of IgM or IgA and thus, for at least this reason, may be included in a multimer of the present disclosure. Additionally, the J chain plays a role in complement activation. For example, IgM hexamers that lack a J chain are more effective at activating complement than IgM pentamers that include a J chain. Thus, in situations in which it is desirable for a multimer to activate complement, omission of the J chain from the multimer may be desirable. Alternatively, in situations in which it is desirable to avoid or limit complement activation (e.g., to avoid damage to epithelial membranes from complement activation), inclusion of the J chain in the multimer is desirable.

[0189] To include a J chain in the multimer, an expression construct encoding the J chain can be co-transfected into a host cell along with the other multimer components (see e.g., FIGS. 1-5 and Example 5). In one embodiment, the J chain is expressed from a construct that also encodes one or more other components of the multimer (e.g., as shown in FIG. 5E, in which the MHCII α chain sequences are encoded by the same construct as the J chain, with a ribosomal skipping sequence in between). Additionally, the J chain can serve as the component to which an effector moiety (also referred to as a targeting moiety, as described and provided herein) and/or one or more additional functional moieties (as described herein) can be coupled (e.g., by attachment or other association, e.g., non-covalent association). This can be accomplished recombinantly using an expression construct in which the J chain sequences are operatively linked to the effector moiety sequence (encoding the effector/targeting moiety and comprising one or more effector domains) or functional moiety sequence (as illustrated schematically in FIGS. 2A-B and FIGS. 4A-B for PD-L1 as the effector moiety). A linker sequence can be positioned between the J chain sequence and the effector moiety sequence (encoding the effector/targeting moiety) or functional moiety sequence. Suitable linker sequences are described herein.

[0190] The full-length sequence of human J chain is shown in SEQ ID NO: 26. Example 5 describes the preparation of non-limiting examples of J chain-effector moiety fusion constructs in which at least a portion of the extracellular domain of PD-L1 (i.e., a PD-1-binding portion) is used as the effector/targeting moiety. In one embodiment, the effector/targeting moiety is Domain 1 (D1) of PD-L1, which can be linked to the C-terminus of the J chain (e.g., a fusion construct as shown in SEQ ID NO: 27). In one embodiment, the effector/targeting moiety is the Extracellular Domain (ECD) of PD-L1, which can linked to the C-terminus of the J chain (e.g., a fusion construct as shown in SEQ ID NO: 28). Additional exemplary effector/targeting moieties are described herein and may be coupled to a multimer through use of a J-chain.

### F. Effector/Targeting Moiety

[0191] In certain embodiments, a multimer of the disclosure includes an effector moiety or a targeting moiety. As used herein, the term “effector moiety” is used interchangeably with the term “targeting moiety” to refer to a region of the multimer that comprises one or more effector domains, e.g., one or more domains of a molecule that have or can impart biological activity, such as an immunoglobulin antigen binding site. For example, an effector moiety (or targeting moiety) can “effect” or “target” specific biological responses that contribute to immune modulation, for example, by preventing or driving (i.e., trigger or advance) certain downstream activities (e.g., PD-L1 binding to PD1 to drive immune exhaustion). For avoidance of doubt, the present disclosure contemplates that the effector/targeting moiety can function in a target-specific manner via spatial localization through the pMHC multimer to particular TCRs. That is, the pMHC multimer(s) is/are responsible for imparting spatial localization to a target, while the effector/targeting moiety can bind to a receptor or target (e.g., a cellular component) on or near a cell/tissue where the cognate TCR for the pMHC multimer is located.

[0192] In one embodiment, the effector/targeting moiety also imparts at least one additional functional property to the multimer, such as enhanced immune cell modulation or enhanced target cell killing (e.g., as compared to otherwise identical multimers not comprising the effector/targeting moiety). In various embodiments, the effector/targeting moiety can be or can comprise, for example, a ligand or binding fragment thereof, a cytotoxic molecule, an antibody, antibody fragment, peptide, or antibody-drug conjugate, scFV, or VHH that binds to a surface molecule of interest and/or effects one or more changes in the target cell (e.g., changes downstream activity, e.g., internalizes effector and causes cell death, etc.).

[0193] In multimers that include a J chain, an effector moiety (e.g., comprising one or more effector domains) is typically appended to either the C-terminus or N-terminus of the J chain (see, e.g., Example 5). For multimers that lack a J chain, an effector moiety can be attached to the MHC subunit that is not fused to the multimerization domain. For example, in a multimer in which the MHC Class II β chain is fused to the multimerization domain, the effector moiety can be fused to the MHC Class II α chain. Alternatively, the effector moiety can be attached to the C-terminus of the multimerization moiety.

[0194] In some embodiments, an effector/targeting moiety may be or comprise any agent that causes or prevents a downstream biological effect upon binding. For instance, in some embodiments, an effector/targeting moiety may be or comprise a binding agent or any binding portion thereof that can bind and act on a T cell receptor of a targeted T cell.

[0195] In some embodiments, an effector/targeting moiety acts in cis, binding to the T cell that it will impact directly (i.e., binding to a TCR on a targeted T cell). In some embodiments, an effector/targeting moiety acts in trans, binding to and influencing another different population of cells (e.g., T cells or NK cells) that, in turn, influence a targeted population of T cells.

[0196] In one embodiment, the effector/targeting moiety binds to a T cell surface antigen. In some such embodiments, the present disclosure contemplates that binding of the effector/targeting moiety leads to redirection of those T cells expressing the surface antigen to the multimer such that the T cells function differently from prior to the binding (e.g., an activated T cell becomes suppressed, or may be killed or otherwise removed, a suppressed T cell becomes stimulated, etc.). Additionally, in some embodiments, binding of the effector/targeting moiety to those T cells may modulate T cell activation and/or effector function. Non-limiting examples of suitable effector/targeting moieties for redirection of T cells (and possible mechanism of action) include molecules such as checkpoint protein agonists, anti-inflammatory cytokines, apoptosis-inducing/driving agents, T cell stimulators or expanders, or cytokines that operate in particular ways depending on context (e.g., cytokine-mediated context dependent suppression). For example, in some embodiments, an effector/targeting moiety is or comprises known or putative checkpoint protein agonists such as PD-L1 (Domain 1 or Full ECD) or an checkpoint protein agonist such as anti-PD1, anti-TIGIT, anti-CTLA4, anti-TIM3, anti-Lag3, anti-LILRB1, or anti-LILRB2 agonist antibodies, or a binding domain or portion (e.g., an antigen-binding fragment) of any of these antibodies. In some embodiments, an effector/targeting moiety is or comprises a TNF receptor superfamily agonist (e.g., a TNF family molecule), such as an anti-CD137 agonist antibody or an antigen-binding fragment thereof, or CD137L. In some embodiments, an effector/targeting moiety comprises HLA-G or an extracellular fragment thereof. In some embodiments, an effector/targeting moiety is or comprises an anti-inflammatory cytokine such as TGFβ or IL10 (promotion of Treg phenotype and context-dependent immunosuppression effects). In some embodiments, an effector/targeting moiety is or comprises an inducer of cell death. For example, in some embodiments, the inducer of cell death is a TNF receptor superfamily agonist, such as FasL (a driver of apoptosis by engaging with Fas on target cells), anti-Fas agonist antibody or an antigen-binding fragment (e.g., scFv) thereof (a driver of apoptosis by engaging with Fas on target cells), TRAIL (TNF related apoptosis inducing ligand that activates DR4 and DR5 to induce apoptosis), or anti-DR4 or anti-DR5 agonist antibody or an antigen-binding fragment thereof (induction of apoptosis). In some embodiments, the inducer of cell death is a cytotoxic agent such as a microtubule inhibitor or DNA damaging agent (cell death/elimination). In some embodiments, an effector/targeting moiety is or comprises an agent to enhance or induce expansion of regulatory T cells such as TRAIL, TNFR2 agonist scFv, anti-TRAIL R1, or anti-TRAIL R2 agonist. Furthermore, it is contemplated that two or more such effector moieties, either separately, or conjugated or fused together, may be included in the multimeric compositions described herein.

[0197] In one embodiment, the effector/targeting moiety acts, in trans, as a T cell or NK cell engager by binding to a T cell or an NK cell surface antigen, thereby leading to redirection of those T or NK cells expressing the surface antigen to the MHC multimer, or to MHC-multimer-bound cells. Additionally, binding of the effector/targeting moiety to those T or NK cells can modulate T or NK cell activation and/or effector function. Non-limiting examples of suitable targeting moieties for redirection of T cells include anti-CD3 and for redirection of NK cells effector/targeting moieties that bind CD56, CD16, NKp46, NKp30, CD64 or NKG2D.

[0198] In one embodiment, the effector/targeting moiety binds to a macrophage surface antigen, thereby leading to redirection of those macrophages expressing the surface antigen to the multimer, or to multimer-bound cells. Additionally, binding of the effector/targeting moiety to those macrophages can modulate macrophage activation and/or effector function. A non-limiting example of a suitable effector/targeting moiety for redirection of macrophages is a moiety that binds CD14.

[0199] In one embodiment, the effector/targeting moiety binds to a neutrophil surface antigen, thereby leading to redirection of those neutrophils expressing the surface antigen to the multimer, or to multimer-bound cells. Additionally, binding of the effector/targeting moiety to those neutrophils can modulate neutrophil activation and/or effector function. Non-limiting examples of suitable targeting moieties for redirection to neutrophils include moieties that bind CD16b and CD177.

[0200] In another embodiment, the effector/targeting moiety is an Fc receptor (FcR) binding molecule, thereby redirecting the multimer to FcR-expressing cells, which includes a variety of immune cells (e.g., B cells, follicular dendritic cells, NK cells, macrophages, neutrophils, eosinophils). For example, the effector/targeting moiety can be an FcγR-binding moiety, which can be used e.g., to drive ADCC activity by the multimer.

[0201] In another embodiment, the effector/targeting moiety is either a cytokine or is directed against (binds to) a cytokine. For example, the effector/targeting moiety can be a cytokine that retains its receptor binding capacity, thereby directing the multimer to cells expressing the cytokine receptor. Non-limiting examples of suitable cytokines as targeting moieties can bind include IL-2 or a mutein thereof, IL-12 and IL-15.

[0202] In another embodiment, the effector/targeting moiety is or comprises a checkpoint inhibitor, for example, an antagonist anti-PD1, anti-TIGIT, anti-CTLA4, anti-TIM3, anti-Lag3, anti-LILRB1, or anti-LILRB2 antibody or an antigen-binding fragment of any of these antibodies.

[0203] In addition to the foregoing, various modified J chain constructs have been described in the art that comprise a J chain fused to an effector/targeting moiety, which also are suitable for use in the multimers of the disclosure. Non-limiting examples include the modified J chains described in U.S. Pat. No. 9,951,134 and U.S. Patent Publication No. 2019/0185570.

[0204] By way of non-limiting example, as provided herein, in certain embodiments, an MHC multimer comprises an immunoglobulin J chain linked to an effector/targeting moiety. For instance, to give but one example, a J chain-effector/targeting moiety fusion comprising an effector/targeting moiety, such as PD-L1 (or a PD-1-binding portion thereof), or anti-CD3 scFv from OKT3 can be fused, recombinantly to a C- or N-terminus of a J-chain.

[0205] Alternatively or additionally, in some embodiments, an effector/targeting moiety as provided herein, can be fused at the N-terminus of a J-chain separated by a linker moiety as described herein (e.g., (G₄S)ₙ linker), and, optionally, comprise Flag and/or His-tags. To give but a few examples, effector/targeting moieties such as a PD-L1-D1, PD-L1-ECD, or anti-CD3 scFv as described herein, can be fused at the N-terminus of a J-chain separated by a (G₄S)ₙ linker, and, optionally, comprise Flag and/or His-tags.

[0206] The full-length sequence of human immunoglobulin J chain is shown in SEQ ID NO: 26. To give several non-limiting examples, fusion constructs comprising a human J chain and an effector moiety, along with a linker may be composed. For example, such fusion constructs may be designed as follows: (i) the human J chain with a PD-L1 Domain 1 (D1) at the C-terminus, separated by a (G₄S)₃ linker, such as that set forth by the amino acid sequence shown in SEQ ID NO: 27 or PD-L1-D1 at the N-terminus of the J-chain separated by a (G₄S)₅ linker, and, optionally with C-terminal Flag and His-tags as set forth in SEQ ID NO: 246; (ii) the human J chain with a PD-L1 extracellular domain (ECD) at the C-terminus, separated by a (G₄S)₃ linker, such as that set forth by the amino acid sequence shown in SEQ ID NO: 28 or PD-L1-ECD at the N-terminus of the J-chain separated by a (G₄S)₅ linker, and, optionally with C-terminal Flag and His-tags as set forth in SEQ ID NO: 245; (iii) the human J chain with an anti-CD3 scFv fused recombinantly to the N-terminus of the J-chain separated by a (G₄S)₃ linker, and, optionally with a C-terminal Flag and His tag as set forth in SEQ ID NO: 247; and (iv) the human J chain with an anti-CD3 scFv fused recombinantly to the C-terminus of the J-chain separated by a (G₄S)₃ linker, and, optionally with a C-terminal Flag and His tag as set forth in SEQ ID NO: 275.

[0207] Such J chain-effector moiety constructs as provided by the present disclosure can be transfected into a host cell and coexpressed with MHC multimer construct(s), such as those described herein, to prepare multimers comprising a J chain and an effector/targeting moiety.

### G. Additional Functional Moieties

[0208] In certain embodiments, a multimer provided by the disclosure includes one or more additional heterologous functional moieties. Such a “functional moiety” as used herein refers to one or more additional domains or regions that are incorporated into the multimer to thereby impart one or more functional properties of interest to the multimer, but, like an effector/targeting moiety, does not primarily serve to direct or redirect the location of the multimer. A “heterologous” functional moiety refers to the domain or region being from a molecule (e.g., protein, polypeptide) other than the MHC used in the MHC moiety and the Ig C region(s) used in the multimerization domain. Non-limiting examples of heterologous functional moieties include moieties that increase the half-life, or other pharmacokinetic properties, of the multimer, cytokines (e.g., IL-2, IL-12, IL-15) and cytokine receptors (e.g., IL-2R, IL-12R, IL-15R). A heterologous functional moiety can be incorporated into a multimer in a similar manner as that described above for incorporating an effector/targeting moiety.

### H. Linkers

[0209] In the multimer compositions, in certain embodiments, a linker (also referred to as a spacer) is positioned between the MHC moiety and the multimerization moiety. Linkers can also be positioned between other domains or regions of various components of the multimer. In some embodiments, a multimer does not comprise a linker. For example, in some embodiments, multimers provided by the present disclosure comprise MHC and IgM constant domains that do not comprise a linker in between.

[0210] The terms “linker” or “spacer” denotes a linear amino acid chain of natural and/or synthetic origin. The linkers described herein are designed to ensure that polypeptides conjugated to each other can perform their biological activity by allowing the polypeptides to fold correctly and to be presented properly. The linker may contain repetitive amino acid sequences or sequences of naturally occurring polypeptides. In some embodiments, a peptide linker has a length of from 2 to 50 amino acids. In some embodiments, a peptide linker is between 3 and 30 amino acids, between 5 to 25 amino acids, between 5 to 20 amino acids, or between 10 and 20 amino acids.

[0211] In certain embodiments, the sequence of the linker serves primarily to provide additional space (distance) between domains/regions of a fusion protein. In other embodiments, the sequence of the linker imparts one or more additional functionalities, such as a protease cleavage site to allow cleavage of a fusion protein containing the linker or a ribosomal skipping site to allow for translation of two distinct polypeptides from a fusion mRNA, as described further herein.

[0212] In one embodiment, the linker is a flexible linker, e.g., composed of a glycine-serine-rich sequence, such as the linker shown in SEQ ID NO: 131. In another embodiment, the spacer linker is a rigid linker, e.g., composed of a proline-rich sequence, such as the linker shown in SEQ ID NO: 132. In yet another embodiment, the spacer linker is a flexible-rigid linker, comprising both a flexible region (e.g., a glycine-serine-rich sequence) and a rigid region (e.g., a proline-rich sequence), such as the linker shown in SEQ ID NO: 133.

[0213] In various other embodiments, the peptide linker is rich in glycine, glutamine, and/or serine residues. These residues are arranged e.g. in small repetitive units of up to five amino acids. This small repetitive unit may be repeated for one to five times. At the amino- and/or carboxy-terminal ends of the multimeric unit up to six additional arbitrary, naturally occurring amino acids may be added. Other synthetic peptidic linkers are composed of a single amino acid, which is repeated between 10 to 20 times and may comprise at the amino- and/or carboxy-terminal end up to six additional arbitrary, naturally occurring amino acids. All peptidic linkers can be encoded by a nucleic acid molecule and therefore can be recombinantly expressed. As the linkers are themselves peptides, the polypeptide connected by the linker are connected to the linker via a peptide bond that is formed between two amino acids.

[0214] Suitable peptide linkers are well known in the art, and are disclosed in, e.g., U.S. Patent Publications 2010/0210511 and US2010/0179094, and U.S. Patent Publication 2012/0094909. Other linkers are provided, for example, in U.S. Pat. No. 5,525,491; Alfthan et al. (1995) PROTEIN ENG., 8:725-731; Shan et al. (1999) J. IMMUNOL., 162:6589-6595; Newton et al. (1996) BIOCHEMISTRY, 35:545-553; Megeed et al. (2006) BIOMACROMOLECULES, 7:999-1004; and Perisic et al. (1994) STRUCTURE, 12:1217-1226.

[0215] In some embodiments, the linker is synthetic. As used herein, the term “synthetic” with respect to a linker includes peptides (or polypeptides) which comprise an amino acid sequence (which may or may not be naturally occurring) that is linked in a linear sequence of amino acids to a sequence (which may or may not be naturally occurring) to which it is not naturally linked in nature. For example, the linker may comprise non-naturally occurring polypeptides which are modified forms of naturally occurring polypeptides (e.g., comprising a mutation such as an addition, substitution or deletion) or which comprise a first amino acid sequence (which may or may not be naturally occurring). Preferably, a linker will be relatively non-immunogenic and not inhibit any non-covalent association among monomer subunits of a binding protein.

[0216] In some embodiments, the linker is a Gly-Ser polypeptide linker, i.e., a peptide that consists of glycine and serine residues. One exemplary Gly-Ser polypeptide linker comprises the amino acid sequence (Gly₄Ser)ₙ, wherein n=1-6 (SEQ ID NO: 134). In certain embodiments, n=1. In certain embodiments, n=2. In certain embodiments, n=3. In certain embodiments, n=4. In certain embodiments, n=5. In certain embodiments, n=6. Another exemplary Gly-Ser polypeptide linker comprises the sequence SSSSGSSSSGSAA (SEQ ID NO: 135). Another linker comprises only glycine, e.g., G₅ linkers (GGGGG; SEQ ID NO: 136). Another exemplary Gly-Ser polypeptide linker comprises the amino acid sequence Ser(Gly₄Ser)ₙ, wherein n=1-10 (SEQ ID NO: 137). In certain embodiments, n=1. In certain embodiments, n=2. In certain embodiments, n=3, i.e., Ser(Gly₄Ser)₃. In certain embodiments, n=4, i.e., Ser(Gly₄Ser)₄. In certain embodiments, n=5. In certain embodiments, n=6. In certain embodiments, n=7. In certain embodiments, n=8. In certain embodiments, n=9. In certain embodiments, n=10.

[0217] Other exemplary linkers include GS linkers (i.e., (GS)ₙ), GGSG linkers (i.e., (GGSG)n), wherein n=1-5 (SEQ ID NO: 138), GSAT linkers (SEQ ID NO: 139), SEG linkers, GGS linkers (i.e., (GGSGGS)ₙ) (SEQ ID NO: 140), wherein n is a positive integer (e.g., 1, 2, 3, 4, or 5), (Gly₄Ser)₄ (GGGGSGGGGSGGGGSGGGGS; SEQ ID NO: 141) and (GS)₂AG₂SGSG₃S linkers (GSGSAGGSGSGGGS; SEQ ID NO: 142). Other suitable linkers for use in multimeric fusion proteins can be found using publicly available databases, such as the Linker Database (ibi.vu.nl/programs/linkerdbwww). The Linker Database is a database of inter-domain linkers in multi-functional enzymes which serve as potential linkers in novel multimeric fusion proteins (see, e.g., George et al. (2002) PROTEIN ENGINEERING, 15:871-9).

[0218] In one embodiment, the linker comprises an amino acid sequence selected from the group consisting of SEQ ID NOs: 131-142.

[0219] In certain embodiments, the sequence of the linker imparts a functionality to the linker beyond simply serving as a spacer. For example, in one embodiment, the linker comprises a protease recognition (cleavage) site such that the linker can be cleaved by a protease. In one embodiment the protease is an amino-peptidase. In another embodiment, the protease is a methionine amino-peptidase. In yet other embodiments, the protease is selected from FXa, thrombin, TEV, HRV3C, and furin.

[0220] In certain embodiments, the linker sequence comprises a ribosomal skipping site (sequence) such as a 2A peptide. In an expression construct, when such a ribosomal skipping site is included in a linker positioned between two polypeptide sequences, translation of the transcribed mRNA results in production of the two polypeptides separately, rather than as a fusion protein. The 2A peptide sequences share a core sequence motif of DXEXNPGP, wherein X is any amino acid (SEQ ID NO: 179). Non-limiting examples of suitable 2A peptide sequences include T2A (EGRGSLLTCGDVEENPGP; SEQ ID NO: 180), P2A (ATNFSLLKQAGDVEENPGP; SEQ ID NO: 181), E2A (QCTNYALLKLAGDVESNPGP; SEQ ID NO: 182) and F2A (VKQTLNFDLLKLAGDVESNPGP; SEQ ID NO: 183).

[0221] Additionally, an optional Gly-Ser-Gly (GSG) tripeptide can be added to the N-terminal end of a 2A peptide to enhance efficiency.

### I. Labels

[0222] In certain embodiments, one or more detectable labels are attached to a multimer of the disclosure. As used herein, a “detectable label” is any molecule or functional group that allows for the detection of a biological or chemical characteristic or change in a system, such as the presence of a target substance in the sample. For example, multimers can be conjugated with a fluorescent label, allowing for identification of binding the multimer to a target molecule or cell, for example via flow cytometry or microscopy. Cells can also be selected based on a fluorescence label through, e.g., fluorescence or magnetic activated cell sorting.

[0223] Non-limiting examples of detectable labels include protein tags (e.g., that can be detected with an anti-tag antibody), fluorophores, chromophores, electro chemiluminescent labels, bioluminescent labels, polymers, polymer particles, bead or other solid surfaces, gold or other metal particles or heavy atoms, spin labels, radioisotopes, enzyme substrates, haptens, antigens, Quantum Dots, aminohexyl, pyrene, nucleic acids or nucleic acid analogs, or proteins, such as receptors, peptide ligands or substrates, enzymes, and antibodies (including antibody fragments).

[0224] Numerous protein tags are known in the art that can be appended at the N- or C-terminus of a polypeptide or protein to facilitate detection (e.g., using an anti-tag antibody) and/or purification (e.g., using affinity chromatography). Non-limiting examples of protein tags include a Flag tag (e.g., SEQ ID NO: 143), a 6× histidine tag (His6) (e.g., SEQ ID NO: 144), a V5 tag (e.g., SEQ ID NO: 145), a strep tag (e.g., SEQ ID NO: 146), a protein C tag (e.g., SEQ ID NO: 147), a myc tag (e.g., SEQ ID NO: 148), an avitag-Myc sequence (e.g., SEQ ID NO: 149), an avitag-Myc-His6 sequence (e.g., SEQ ID NO: 150) and/or an avitag-His6-Flag sequence (e.g., SEQ ID NO: 151), and combinations thereof.

[0225] Additional tags suitable for use in the methods and compositions provided herein include affinity tags, including but not limited to enzymes, protein domains, or small polypeptides which bind with high specificity to a range of substrates, such as carbohydrates, small biomolecules, metal chelates, antibodies, etc., to allow rapid and efficient purification of proteins. Solubility tags enhance proper folding and solubility of a protein and are frequently used in tandem with affinity tags. Sequences encoding such a tag(s) can be incorporated into an expression construct of the disclosure, such as at the C-terminus or N-terminus of the multimer-encoding regions to thereby incorporate a detectable tag into the expressed polypeptide.

[0226] Examples of enzymes which may be used comprise horse radish peroxidase (HRP), alkaline phosphatase (AP), β-galactosidase (GAL), glucose-6-phosphate dehydrogenase, β-N-acetylglucosaminidase, β-glucuronidase, invertase, Xanthine Oxidase, firefly luciferase and glucose oxidase (GO). Examples of commonly used substrates for horse radish peroxidase (HRP) include 3,3′-diaminobenzidine (DAB), diaminobenzidine with nickel enhancement, 3-amino-9-ethylcarbazole (AEC), Benzidine dihydrochloride (BDHC), Hanker-Yates reagent (HYR), Indophane blue (IB), tetramethylbenzidine (TMB), 4-chloro-1-naphtol (CN), α-naphtol pyronin (.α.-NP), o-dianisidine (OD), 5-bromo-4-chloro-3-indolylphosphate (BCIP), Nitroblue tetrazolium (NBT), 2-(p-iodophenyl)-3-p-nitrophenyl-5-phenyltetrazolium chloride (INT), tetranitro blue tetrazolium (TNBT), delta.-bromo-chloro-S-indoxyl-β-D-galactoside/ferro-ferricyanide (BCIG/FF). Examples of commonly used substrates for Alkaline Phosphatase include Naphthol-AS-B1-phosphate/fast red TR (NABP/FR), Naphthol-AS-MX-phosphate/fast red TR (NAMP/FR), Naphthol-AS-B1-phosphate/fast red TR (NABP/FR), Naphthol-AS-MX-phosphate/fast red TR (NAMP/FR), Naphthol-AS-B1-phosphate/new fuschin (NABP/NF), bromochloroindolylphosphate/nitroblue tetrazolium (BCIP/NBT), b-Bromo-chloro-S-indolyl-β-delta-galactopyranoside (BCIG).

[0227] Examples of luminescent labels which may be used include luminol, isoluminol, acridinium esters, 1,2-dioxetanes and pyridopyridazines. Examples of electrochemiluminescent labels include ruthenium derivatives. Examples of radioactive labels which may be used include radioactive isotopes of iodide, cobalt, selenium, hydrogen, carbon, sulfur, and phosphorous.

[0228] Some “detectable labels” also include “color labels,” in which the biological change or event in the system may be assayed by the presence of a color, or a change in color. Examples of “color labels” are chromophores, fluorophores, chemiluminescent compounds, electrochemiluminescent labels, bioluminescent labels, and enzymes that catalyze a color change in a substrate.

[0229] “Fluorophores” as described herein are molecules that emit detectable electro-magnetic radiation upon excitation with electro-magnetic radiation at one or more wavelengths. A large variety of fluorophores are known in the art and are developed by chemists for use as detectable molecular labels and can be conjugated to the multimers provided herein. Examples include FLUORESCEIN™. or its derivatives, such as FLUORESCEIN®-5-isothiocyanate (FITC), 5-(and 6)-carboxyFLUORESCEIN®, 5- or 6-carboxyFLUORESCEIN®,6-(FLUORESCEIN®)-5-(and 6)-carboxamido hexanoic acid, FLUORESCEIN® isothiocyanate, rhodamine or its derivatives such as tetramethyl rhodamine and tetramethylrhodamine-5-(and -6) isothiocyanate (TRITC). Other fluorophores include: coumarin dyes such as (diethyl-amino)coumarin or 7-amino-4-methylcoumarin-3-acetic acid, succinimidyl ester (AMCA); sulforhodamine 101 sulfonyl chloride (TexasRed® or TexasRed® sulfonyl chloride; 5-(and -6)-carboxyrhodamine 101, succinimidyl ester, also known as 5-(and -6)-carboxy-X-rhodamine, succinimidyl ester (CXR); lissamine or lissamine derivatives such as lissamine rhodamine B sulfonyl Chloride (LisR); 5-(and -6)-carboxyFLUORESCEIN®, succinimidyl ester (CFI); FLUORESCEIN®5-isothiocyanate (FITC); 7-diethylaminocoumarin-3-carboxylic acid, succinimidyl ester (DECCA); 5-(and -6)-carboxytetramethyl-rhodamine, succinimidyl ester (CTMR); 7-hydroxycoumarin-3-carboxylic acid, succinimidyl ester (HCCA); 6->FLUORESCEIN®.-5-(and -6)-carboxamidolhexanoic acid (FCHA); N-(4,4-difluoro-5,7-dimethyl-4-bora-3a,4a-diaza-3-indacenepropionic acid, succinimidyl ester; also known as 5,7-dimethylBODIPY® propionic acid, succinimidyl ester (DMBP); “activated FLUORESCEIN® derivative” (FAP), available from Probes, Inc.; eosin-5-isothiocyanate (EITC); erythrosin-5-isothiocyanate (ErlTC); and Cascade® Blue acetylazide (CBAA) (the O-acetylazide derivative of 1-hydroxy-3,6,8-pyrene-trisulfonic acid). Yet other potential fluorophores useful in this disclosure include fluorescent proteins such as green fluorescent protein and its analogs or derivatives, fluorescent amino acids such as tyrosine and tryptophan and their analogs, fluorescent nucleosides, and other fluorescent molecules such as Cy2, Cy3, Cy 3.5, CY5™, CY5™5, Cy 7, IR dyes, Dyomics dyes, phycoerythrine, Oregon green 488, pacific blue, rhodamine green, and Alexa dyes. Yet other examples of fluorescent labels include conjugates of R-phycoerythrin orallophycoerythrin, inorganic fluorescent labels such as particles based on semiconductor material like coated CdSe nanocrystallites.

[0230] In yet other embodiments, a multimer of the disclosure comprises an identifier tag or label. that facilitates identification of the multimer. An “identifier” as used herein refers to a readable representation of data that provides information, such as an identity, that corresponds with the identifier. For instance, in some embodiments, an identifier is or comprises an oligonucleotide barcode. Typically, an oligonucleotide barcode is a unique oligonucleotide sequence ranging from 10 to more than 50 nucleotides. The barcode has shared amplification sequences in the 3′ and 5′ ends, and a unique sequence in the middle. This sequence can be revealed by sequencing and can serve as a specific barcode for a given molecule. The use of barcode technology is well known in the art, see for example Shiroguchi et al. (2012) PROC. NATL. ACAD. SCI. USA, 109(4):1347-52; and Smith et al. (2010) NUCLEIC ACIDS RESEARCH, 38(13)11:e142. Further methods and compositions for using barcode technology include those described in U.S. Patent Publication No. 2016/0060621. Standard methods for preparing barcode oligonucleotides and conjugating them to molecules of interest are known in the art.

### J. Modifications

[0231] In certain embodiments, the multimers of the disclosure comprise one or more modifications as compared to the wild-type version of the MHC molecule (Class I or Class II), the MHC-binding peptide and/or the Ig-derived multimerization domain. Such modifications can be introduced to impart new features to the multimer and/or to eliminate undesired features of the multimer.

[0232] For example, in one embodiment, a component of the multimer can be mutated to eliminate putative or confirmed N-linked or O-linked glycosylation sites to thereby alter the glycosylation of the component.

[0233] In another embodiment, a component of the multimer can be mutated to introduce one or more disulfide bridges to increase stability of the component itself or the multimer as a whole. Disulfide bridging can be introduced, for example, into an MHC chain or an MHC-binding peptide to enhance stability. The crystal structure of certain MHC molecules are known in the art (e.g., 1HXY.pdb; Petersson et al. (2001) EMBO J., 20:3306-3312) and can be used to design appropriate cysteine mutations. Example 4 describes introduction of two disulfide bridges into an MHC Class I heavy chain sequence to increase the stability of empty MHC Class I monomers. In another embodiment, one or more disulfide bridges can be introduced into an MHC-binding peptide to create a “disulfide-locked” peptide to enhance stability of the peptide-MHC interaction. In another embodiment, one cysteine can be introduced into the peptide and one into the HLA molecule to form a disulfide to thereby stabilize the peptide-loaded MHC conformation (e.g., as described in Serra et al. (2019) NATURE COMM., 10:4917).

[0234] Furthermore, specific modifications of Ig constant regions that alter effector function have been described in the art and can be applied to the multimerization moiety of the MHC multimer to, e.g., alter disulfide bridging, alter half-life or alter complement activation ability. For example, the P311G mutation can be introduced into IgM C region to minimize complement-dependent cytotoxicity (CDC) (see e.g., Chen et al. (2020) MABS, 12:1818436). Additional constant region modifications known in the art include those described in U.S. Pat. No. 10,351,631 and U.S. Patent Publication No. 2020/0239572.

[0235] For example, modifications to the IgM Fc region or J chain have been described in the art that increase serum half-life (see e.g., U.S. Pat. No. 10,899,835, published as U.S. Patent Publication No. 2020/0239572). Accordingly, such modification(s) can be introduced into the Fc region or J chain of a multimer of the disclosure to increase serum half-life.

[0236] Additionally, modifications to the IgM constant regions that modulate complement-dependent cytotoxicity effector functions have been described in the art (see e.g., PCT Publication WO 2018/187702). Accordingly, such modification(s) can be introduced into the Fc region of a multimer of the disclosure to modulate complement-mediated effector functions.

[0237] In another embodiment, an MHC multimer of the disclosure is prepared as a bispecific multimer, wherein the bispecific multimer presents two different MHC-binding peptides on two different MHC molecules, as illustrated schematically in FIG. 6A and FIG. 6B. Such bispecific multimers can be prepared using knobs-into-holes (KIH) technology or electrostatic steering technology, which are well-established approaches in the art for creating bispecific antibodies. KIH technology involves engineering constant domains to create either a “knob” or a “hole” in each heavy chain to promote heterodimerization (see e.g., U.S. Pat. No. 10,351,631). Electrostatic steering involves engineering salt bridges through pairs of oppositely charged amino acids to promote heterodimerization (see e.g., Gunasekaran et al., (2010) J BIOL CHEM., 285(25):19637-46). Among other things, the present disclosure contemplates that KIH technology or electrostatic steering are useful for making various multimers as provided herein.

[0238] For example, in some embodiments, KIH technology can be used to introduce a knob into the Cμ4 of one chain of the Ig-derived multimerization domain and a hole into the Cμ4 of the other chain, as illustrated in FIG. 6A, to create a bispecific MHC multimer presenting two different MHC-binding peptides. Such KIH technology can also be used, for example, to introduce a knob into a Cα3 of one chain of an IgA multimerization domain and a hole into a Cα3 of the other chain (FIG. 6B) to create a bispecific MHC multimer presenting two different MHC binding peptides (see e.g., U.S. Pat. No. 10,822,399). In some embodiments, electrostatic steering may be used, wherein amino acid changes introducing salt-bridges can be introduced into at least one of a Cμ2, Cμ3 or Cμ4 domain of an IgM to promote heterodimerization. In other embodiments, KIH technology or electrostatic steering technology may be used to make a pMHC Class II IgM multimer that includes an α-IgM (“knob”) and a peptide-β-IgM (“hole”). Such a strategy would create a pentavalent pMHC class II IgM having five pMHC II moieties.

### 1. Modification of MHC Class I Alpha (a) Chain to Enhance Stability

[0239] While MHC Class I multimers have typically been prepared as “peptide-loaded” (i.e., having a peptide bound to the peptide-binding groove) for stability, the present disclosure contemplates that, in some embodiments, one or more modifications within an MHC Class I α chain of an MHC Class I multimer can be introduced to stabilize the “empty” MHC Class I molecule such that multimers can be prepared a pre-requisite of being peptide-loaded. Rather, by using stabilization techniques provided by the present disclosure, such empty multimers, comprising one or more modifications to an MHC Class I α chain, can be prepared and then peptide addition can be performed at a later time to load the multimers.

[0240] Mutations and/or modifications (e.g., engineered disulfide bonds) that stabilize empty MHC Class I molecules (e.g., between alpha helices) have been described in the art (e.g., as described in Saini et al. (2019) SCIENCE IMMUNOL., 4:eaau9039). In particular, standard recombinant DNA technology can be used to introduce a disulfide bond to link the α1 and α2 helices of the MHC Class I α chain. For example, for HLA-A*02:01, Y84C and A139C mutations can be introduced. For instance, one example is a fusion protein having the structure: β2m-linker-A*02:01 (Y84C, A139C)-linker-IgM Cμ2-Cμ3-Cμ4-TP has the amino acid sequence shown in SEQ ID NO: 23 and comprises α-chain modifications designed to increase stability of the “empty” multimer. A construct encoding this fusion protein can be expressed in a host cell to create a stable “empty” MHCI-IgM multimer to which peptides can be added for loading.

[0241] Alternatively, in some instances, an MHCI α chain and β2-microglobulin chain can be expressed separately in host cell. For example, a fusion protein having the structure: A*02:01 (Y84C, A139C)-linker-IgM Cμ2-Cμ3-Cμ4-TP has the amino acid sequence shown in SEQ ID NO: 24. The human β2-microglobulin chain has the amino acid sequence shown in SEQ ID NO: 25. Separate expression constructs encoding the α chain-IgM fusion protein and the β2-microglobulin chain can be expressed in a host cell to create a stable “empty” MHCI-IgM multimer to which peptides can be added for loading.

### III. Preparation of Multimers

[0242] The multimers of the disclosure can be prepared by methods established in the art. In one embodiment, a multimer is prepared using recombinant DNA technology, as described further below. In another embodiment, a multimer is prepared using chemical conjugation, various approaches for which are described further below.

### A. Recombinant Expression Strategies

[0243] As provided herein, certain exemplary recombinant expression strategies may be employed in design and manufacture of a multimer. In one embodiment, a multimer composition of the disclosure is prepared by standard recombinant DNA techniques using one or more nucleic acid constructs that encode polypeptides that when expressed in a host cell self-assemble into a multimer in which an MHC moiety is operatively linked to a multimerization moiety (typically with linker sequences positioned between the sequences encoding the MHC moiety and the multimerization moiety). Non-limiting representative nucleic acid constructs for expressing a multimer composition are shown schematically in FIGS. 5A-5I. Use of such expression constructs for recombinantly preparing a multimer are described in detail in Examples 1 and 3.

[0244] Exemplary approaches for recombinantly expressing peptide-MHCI-Ig multimers of the disclosure are provided and illustrated schematically herein. For instance, representative non-limiting examples of peptide-MHCI-Ig multimer structures are illustrated schematically in FIGS. 1A-1D and FIGS. 2A-2C, wherein the multimers of FIGS. 2A-2C include an effector/targeting moiety (e.g., PD-L1).

[0245] In one approach, MHC Class I multimers (as schematically illustrated in FIG. 5A) are made using two different constructs to create the peptide-MHC-Ig multimer. The first expression construct encodes, 5′ to 3′, an MHC Class I-binding peptide, β-2-microglobulin and an MHC Class I α chain (each separated by linkers), operatively linked to IgM Cμ2, Cμ3 and Cμ4 constant regions and the tailpiece region, with a linker sequence positioned between the peptide-MHC and IgM sequences. The second expression construct encodes the J chain. To express the complete peptide-MHC-Ig multimer, the two expression constructs are transfected into a host cell and the host cell is cultured to allow for expression of the two encoded constructs.

[0246] Another approach to make MHC Class I multimers (as schematically illustrated in FIG. 5B), is similar to the first approach, as depicted in FIG. 5A, using two separate constructs, except that the second expression construct encoding the immunoglobulin J chain is operatively linked to an effector/targeting moiety with a linker sequence positioned between the J chain and the effector moiety sequences. Again, to express the complete peptide-MHC-Ig multimer, the two expression constructs are transfected into a host cell and the host cell is cultured to allow for expression of the two encoded constructs.

[0247] SEQ ID NOs: 1 and 2 set forth non-limiting examples of amino acid and nucleotide sequences, respectively, for constructs comprising: peptide-GS linker-β2microglobulin-GS linker-MHC Class I α chain-GS linker-IgM Cμ2, Cμ3 and Cμ4 constant regions and the tailpiece region. SEQ ID NOs: 3 and 4 show non-limiting examples of amino acid and nucleotide sequences, respectively, for constructs comprising: peptide-GS linker-β2microglobulin-GS linker-MHC Class I α chain-GS linker-IgM Cμ3 and Cμ4 constant regions and the tailpiece region. The MHC Class I molecule used in these constructs is HLA-A*02:01 and peptide used in these constructs is the CMV pp65 epitope having the amino acid sequence shown in SEQ ID NO: 19.

[0248] SEQ ID NOs: 5 and 6 show the amino acid sequences of exemplary peptide-MHCI-IgM constructs similar to those of SEQ ID NOs: 1 and 3 (having the structure of: peptide-GS linker-β2microglobulin-GS linker-MHC Class I α chain-GS linker-IgM domains) except that SEQ ID NOs: 5 and 6 use an HLA-A*02:01-restricted MART-1 epitope, having the amino acid sequence shown in SEQ ID NO: 20, as the peptide. The construct of SEQ ID NO: 5 uses IgM Cμ2, Cμ3 and Cμ4, as well as the tailpiece region, whereas the construct of SEQ ID NO: 6 uses IgM Cμ3 and Cμ4, as well as tailpiece region. The construct of SEQ ID NO: 6 is encoded by the nucleotide sequence shown in SEQ ID NO: 7.

[0249] In some embodiments, a multimer comprises a Cμ3-4 variant (“var2”) set forth in SEQ ID NO: 254. SEQ ID NOs: 249 and 248 show the amino acid sequences of (i) ELA- and (ii) NLV-pMHC-IgM Cu3-4var2, respectively.

[0250] SEQ ID NOs: 8, 9 and 11 show the amino acid sequences of exemplary peptide-MHCI-IgA constructs having the structure of: peptide-GS linker-β2microglobulin-GS linker-MHC Class I α chain-GS linker-IgA regions. All three constructs use HLA-A*02:01 as the MHC Class I molecule and the CMV pp65 epitope as the peptide. The construct of SEQ ID NO: 8 includes the IgA1.1 regions. The construct of SEQ ID NO: 9 includes the IgA2m2.1 regions. The construct of SEQ ID NO: 11 includes the IgA2m2.2 regions. The construct of SEQ ID NO: 9 is encoded by the nucleotide sequence of SEQ ID NO: 10. The construct of SEQ ID NO: 11 is encoded by the nucleotide sequence of SEQ ID NO: 12.

[0251] In some embodiments, exemplary schematics for recombinantly expressing peptide-MHCII-Ig multimer structures are provided in FIGS. 3A-3C and FIGS. 4A-4C, wherein the multimers of FIGS. 4A-C include an effector/targeting moiety (e.g., PD-L1).

[0252] Three expression approaches for MHC Class II multimers are schematically illustrated in FIGS. 5C-5E. In the approach schematically illustrated in FIG. 5C, three different constructs are used to create the peptide-MHC-Ig multimer. The first expression construct encodes, in 5′ to 3′ order, an MHC Class II-binding peptide and an MHC Class II R chain (separated by a linker), operatively linked to IgM Cμ2, Cμ3 and Cμ4 constant regions and the tailpiece region, with a linker sequence positioned between the peptide-MHC and IgM sequences. The second expression construct encodes an MHC Class II α chain and the third expression construct encodes the J chain. To express the complete peptide-MHC-Ig multimer, the three expression constructs are transfected into a host cell and the host cell is cultured to allow for expression of the three encoded constructs.

[0253] The approach schematically illustrated in FIG. 5D is similar to the approach of FIG. 5C, using three separate constructs, except that the third expression construct encoding the immunoglobulin J chain is operatively linked to an effector moiety sequence encoding a PD-L1 effector/targeting moiety, with a linker sequence positioned between the J chain and the PD-L1 sequences. Again, to express the complete peptide-MHC-Ig multimer, the three expression constructs are transfected into a host cell and the host cell is cultured to allow for expression of the two encoded constructs.

[0254] In the approach schematically illustrated in FIG. 5E, only two expression constructs are used for the MHC Class II multimers, wherein the first expression construct (encoding peptide-MHCII β chain-IgM) is the same as in FIG. 5C and FIG. 5D and the second expression construct encodes, in 5′ to 3′ order, an MHC Class II α chain, a skipping peptide (T2A), the J chain and a PD-L1 effector/targeting moiety (with a linker between the J chain and PD-L1).

[0255] For all of the approaches shown in FIGS. 5C-E, after transfection of the expression constructs into a host cell, the peptide-MHC-Ig multimer self-assembles and can be purified from the host cells, or culture supernatant thereof, by standard methods.

[0256] Non-limiting representative examples of peptide-MHCII-Ig expression constructs can be prepared to achieve the MHCII α chain/P chain pairings shown below in Table 1 in the assembled multimers. In some embodiments, any of these pairings may also comprise a construct encoding a J-chain (as set forth in SEQ ID NO: 251).

TABLE 1
MHCII Pairings in peptide-MHCII-Ig Multimers

| Pairing | Protein name | MHCII Alpha chain | MHCII Beta chain |
|---|---|---|---|
| #1 | HA-DR1-IgM(Cμ2-4) | DRA1*01 | HA-DRB1*01-Cμ2-4 |
| #2 | HA-Xa-DR1-IgM(Cμ2-4) | DRA1*01 | HA-Xa-DRB1*01-Cμ2-4 |
| #3 | HA-DR1-DS-IgM(Cμ2-4) | DRA1*01(S95C) | HA-DRB1*01(S120C)-Cμ2-4 |
| #4 | CLIP-Xa-DR1-IgM(Cμ2-4) | DRA1*01 | CLIP-Xa-DRB1*01-Cμ2-4 |

[0257] For pairing #1, the amino acid sequence of the DRA1*01 α chain is shown in SEQ ID NO: 13 and the amino acid sequence for the peptide-MHCII β chain-IgM construct is shown in SEQ ID NO: 14. The latter construct has the structure: peptide-GS linker-DRB1*01 MHCII-GS linker-IgM Cμ2, Cμ3 and Cμ4, as well as the tailpiece region. The peptide used is hemagglutinin 306-318, having the amino acid sequence shown in SEQ ID NO: 21.

[0258] For pairing #2, SEQ ID NO: 13 was again used for the α chain construct. The peptide-MHCII β chain-IgM construct is shown in SEQ ID NO: 15. The latter construct is the same as that used in pairing #1, except that an Xa linker is used between the peptide and the MHCII β chain, rather than a GS linker.

[0259] For pairing #3, a mutant DRA1*01 α chain, having S95C mutation, was used. The amino acid sequence of this α chain is shown in SEQ ID NO: 16. The peptide-MHCII β chain-IgM construct is shown in SEQ ID NO: 17. The latter construct is the same as that used in pairing #1, except that there is an S120C mutation introduced into the MHCII β chain.

[0260] For pairing #4, SEQ ID NO: 13 was again used for the α chain construct. The peptide-MHCII β chain-IgM construct is shown in SEQ ID NO: 18. The latter construct is the same as that used in pairing #2 (using an Xa linker between the peptide and the R chain), except that a CLIP peptide having the amino acid sequence shown in SEQ ID NO: 22 is used instead of the HA peptide.

[0261] The use of an engineered disulfide bond, a cys-trap, to improve expression of Class I pMHC-IgM, described in Example 4, can be applied to Class II pMHC-IgM multimers to improve expression. For instance, certain exemplary constructs made using such techniques include any of those set forth in SEQ ID NOs: 216-220. Representative pairings of peptide-MHC II β chain and MHC II α chains to make Cys-trapped Class II pMHC-IgM multimers are listed in Table 2.

TABLE 2
MHCII Pairings for Cys-trapped Class II pMHC-IgM Multimers

| | | | SEQ | | | | |
|---|---|---|---|---|---|---|---|
| | | MHCII Beta | ID | MHCII | SEQ | | SEQ ID |
| Pairing | Protein Name | Chain Name | NO: | Alpha Chain | ID NO: | J chain | NO: |
| #1 | MTB(C15)- | MTB(C15)- | 218 | DRA1*01- | 216 | J chain- | 251 |
| | DR15- | DRB1*15:01- | | I92C-cJun | | (G4S)2- | |
| | FosW/cJun-IgM | FosW-Cu2-4 | | | | Flag-His | |
| #2 | RQ13(C14)- | RQ13(C14)- | 219 | DRA1*01- | 217 | J chain- | 251 |
| | DR1-IgM | DRB1*01:01- | | I92C | | (G4S)2- | |
| | | Cu2-4 | | | | Flag-His | |
| #3 | MBP(C14)- | MBP(C14)- | 220 | DRA1*01- | 216 | J chain- | 251 |
| | DR15- | DRB1*15:01- | | I92C-cJun | | (G4S)2- | |
| | FosW/cJun-IgM | FosW/cJun-Cu2-4 | | | | Flag-His | |

[0262] For pairing #1, the amino acid sequence for the peptide-MHCII β chain-FosW-IgM construct is shown in SEQ ID NO: 218. The amino acid sequence for the DRA1*01 α chain-cJun is shown in SEQ ID NO: 216. The J-chain amino acid sequence is shown in SEQ ID NO: 251.

[0263] For pairing #2, the amino acid sequence for the peptide-MHCII β chain-IgM construct is shown in SEQ ID NO: 219. The amino acid sequence for the DRA1*01 α chain is shown in SEQ ID NO: 217. The J-chain amino acid sequence is shown in SEQ ID NO: 251.

[0264] For pairing #3, the amino acid sequence for the peptide-MHCII β chain-IgM is show in SEQ ID NO: 220. The amino acid sequence for the DRA1*01 α chain-cJun is shown in SEQ ID NO: 216. The J-chain amino acid sequence is shown in SEQ ID NO: 251.

[0265] General techniques for nucleic acid manipulation are well established in the art, such as described in, for example, Sambrook et al. (1989) MOLECULAR CLONING: A LABORATORY MANUAL, 2ND EDITION, Vols. 1-3, Cold Spring Harbor Laboratory Press, or Ausubel, F. et al. (1987) CURRENT PROTOCOLS IN MOLECULAR BIOLOGY, Green Publishing and Wiley-Interscience, New York. Generally, the DNA encoding the polypeptide is operably linked to suitable transcriptional or translational regulatory elements derived from mammalian, viral, or insect genes. Such regulatory elements include a transcriptional promoter, an optional operator sequence to control transcription, a sequence encoding suitable mRNA ribosomal binding site, and sequences that control the termination of transcription and translation. The ability to replicate in a host, usually conferred by an origin of replication, and a selection gene to facilitate recognition of transformants is additionally incorporated.

[0266] In one embodiment, the nucleic acid construct is designed to be suitable for in vitro transcription/translation (IVTT). In one embodiment, the nucleic acid is designed to be suitable for recombinant expression in a host cell. Appropriate cloning and expression vectors for use with bacterial, fungal, yeast, and mammalian cellular hosts can be found in CLONING VECTORS: A LABORATORY MANUAL (Elsevier, New York (1985)), the relevant disclosure of which is hereby incorporated by reference.

[0267] In some embodiments, the multimer composition is synthesized utilizing an in vitro transcription/translation (IVTT) system that can both transcribe, for example, a DNA construct into RNA, and then translate the RNA into a protein. IVTT can allow for protein production in a cell-free environment directly from a DNA or RNA template. An IVTT method used herein can be performed using, for example, a PCR product, a linear DNA plasmid, a circular DNA plasmid, or an mRNA template with a ribosome-binding site (RBS) sequence. After the appropriate template has been isolated, transcription components can be added to the template including, for example, ribonucleotide triphosphates, and RNA polymerase. After transcription has been completed, translation components can be added, which can be found in, for example, rabbit reticulocyte lysate, or wheat germ extract. In some methods, the transcription and translation can occur during a single step, in which purified translation components found in, for example, rabbit reticulocyte lysate or wheat germ extract are added at the same time as adding the transcription components to the nucleic acid template.

[0268] In one embodiment, the nucleic acid sequence is incorporated into a vector, such as a plasmid vector, a viral vector or a non-viral vector. The vector is selected to be suitable for use in the intended host cell (i.e., the vector incudes all necessary transcriptional regulatory elements to allow for expression of the encoded multimer composition in the host cell). Suitable vectors, including transcriptional regulatory elements for use in various host cells, including mammalian host cells, are well established in the art.

[0269] As appreciated by those skilled in the art, because of third base degeneracy, almost every amino acid can be represented by more than one triplet codon in a coding nucleotide sequence. In addition, minor base pair changes may result in a conservative substitution in the amino acid sequence encoded but are not expected to substantially alter the biological activity of the gene product. Therefore, a nucleic acid sequence encoding a protein described herein may be modified slightly in sequence and yet still encode its respective gene product.

[0270] Nucleic acids encoding any of the various proteins or polypeptides described herein may be synthesized chemically or prepared through standard recombinant DNA techniques. Codon usage may be selected so as to improve expression in a cell. Such codon usage will depend on the cell type selected. Specialized codon usage patterns have been developed for E. coli and other bacteria, as well as mammalian cells, plant cells, yeast cells and insect cells. See for example: Mayfield et al. (2003) PROC. NATL. ACAD. SCI. USA, 100(2):438-442; Sinclair et al. (2002) PROTEIN EXPR. PURIF., 26(I):96-105; Connell, N. D. (2001) CURR. OPIN. BIOTECHNOL., 12(5):446-449; Makrides et al. (1996) MICROBIOL. REV., 60(3):512-538; and Sharp et al. (1991) YEAST, 7(7):657-678.

[0271] In one embodiment, the vector is designed for expression in a prokaryotic host cell (e.g., E. coli). In one embodiment, the vector is designed for expression in a eukaryotic host cell (e.g., yeast). In one embodiment, the vector is designed for expression in a mammalian host cell. In one embodiment, the mammalian host cells are human host cells. In one embodiment, the human host cells are human embryonic kidney (HEK) cells. In one embodiment, the HEK cells are 293 cells or are a 293-derived HEK strain. Such HEK cells are commercially available in the art, a non-limiting example of which is the Expi293F™ cell line (Fisher ThermoScientific). In yet another embodiment, the mammalian host cell is a CHO cell line.

[0272] When mammalian host cells are used, typically the signal sequence used in the expression construct is derived from a mammalian protein. A signal sequence used to express a secreted protein can be a homologous signal sequence (derived from the same protein being expressed) or a heterologous signal sequence (derived from a different protein than the one being expressed). In one embodiment, a heterologous signal sequence is from an Ig supergroup member. In one embodiment, the signal sequence is an immunoglobulin chain signal sequence. In one embodiment, the signal sequence is an Ig Kappa chain V-III region CLL signal peptide, e.g., having the sequence MEAPAQLLFLLLLWLPDTTG (SEQ ID NO: 184). Other suitable signal sequences include a human CD4 signal peptide, e.g., having the sequence MNRGVPFRHLLLVLQLALLPAAT (SEQ ID NO: 185), a mouse Ig kappa chain V-III region signal peptide, e.g., having the sequence METDTLLLWVLLLWVPGSTG (SEQ ID NO: 186), a mouse H-2Kb signal peptide, e.g., having the sequence MVPCTLLLLLAAALAPTQTRA (SEQ ID NO: 187), a human serum albumin signal peptide, e.g., having the sequence MKWVTFISLLFLFSSAYS (SEQ ID NO: 188), a human IL-2 signal peptide, e.g., having the sequence MYRMQLLSCIALSLALVTNS (SEQ ID NO: 189), a human HLA-A*02:01 signal peptide, e.g., having the sequence MAVMAPRTLLLLLSGALALTQTWA (SEQ ID NO: 190) and a human β2m signal peptide, e.g., having the sequence MSRSVALAVLALLSLSGLEA (SEQ ID NO: 191).

[0273] Furthermore, the transcriptional regulatory sequences used in the vector are selected for their effectiveness in mammalian host cell expression.

[0274] Other expression systems include stable Drosophila cell transfectants and baculovirus infected insect-cells suitable for expression of proteins.

[0275] For prokaryotic host cells that do not recognize and process a native signal sequence, the signal sequence is substituted by a prokaryotic signal sequence selected, for example, from the group of the alkaline phosphatase, penicillinase, 1 pp, or heat-stable enterotoxin II leaders.

[0276] For yeast secretion the native signal sequence may be substituted by, e.g., a yeast invertase leader, a factor leader (including Saccharomyces and Kluyveromyces α-factor leaders), or acid phosphatase leader, the C. albicans glucoamylase leader, or the signal sequence described in U.S. Pat. No. 5,631,144. In mammalian cell expression, mammalian signal sequences as well as viral secretory leaders, for example, the herpes simplex gD signal, are available. The DNA for such precursor regions may be ligated in reading frame to DNA encoding the protein.

[0277] Both expression and cloning vectors contain a nucleic acid sequence that enables the vector to replicate in one or more selected host cells. Generally, in cloning vectors this sequence is one that enables the vector to replicate independently of the host chromosomal DNA, and includes origins of replication or autonomously replicating sequences. Such sequences are well known for a variety of bacteria, yeast, and viruses. The origin of replication from the plasmid pBR322 is suitable for most Gram-negative bacteria, the 2 micron plasmid origin is suitable for yeast, and various viral origins (SV40, polyoma, adenovirus, VSV or BPV) are useful for cloning vectors in mammalian cells. Generally, the origin of replication component is not needed for mammalian expression vectors (the SV40 origin may typically be used only because it contains the early promoter).

[0278] Expression and cloning vectors may contain a selection gene, also termed a selectable marker. Typical selection genes encode proteins that (a) confer resistance to antibiotics or other toxins, e.g., ampicillin, neomycin, methotrexate, or tetracycline, (b) complement auxotrophic deficiencies, or (c) supply critical nutrients not available from complex media, e.g., the gene encoding D-alanine racemase for Bacilli.

[0279] Expression and cloning vectors usually contain a promoter that is recognized by the host organism and is operably linked to the coding sequences. Promoters suitable for use with prokaryotic hosts include the phoA promoter, β-lactamase and lactose promoter systems, alkaline phosphatase, a tryptophan (trp) promoter system, and hybrid promoters such as the tan promoter. However, other known bacterial promoters are suitable. Promoters for use in bacterial systems also will contain a Shine-Dalgarno (S.D.) sequence operably linked to the DNA encoding the protein described herein. Promoter sequences are known for eukaryotes. Virtually all eukaryotic genes have an AT-rich region located approximately 25 to 30 bases upstream from the site where transcription is initiated. Another sequence found 70 to 80 bases upstream from the start of transcription of many genes is a CNCAAT region where N may be any nucleotide. At the 3′ end of most eukaryotic genes is an AATAAA sequence that may be the signal for addition of the poly A tail to the 3′ end of the coding sequence. All of these sequences are suitably inserted into eukaryotic expression vectors.

[0280] Examples of suitable promoting sequences for use with yeast hosts include the promoters for 3-phosphoglycerate kinase or other glycolytic enzymes, such as enolase, glyceraldehyde-3-phosphate dehydrogenase, hexokinase, pyruvate decarboxylase, phosphofructokinase, glucose-6-phosphate isomerase, 3-phosphoglycerate mutase, pyruvate kinase, triosephosphate isomerase, phosphoglucose isomerase, and glucokinase.

[0281] Transcription from vectors in mammalian host cells can be controlled, for example, by promoters obtained from the genomes of viruses such as polyoma virus, fowlpox virus, adenovirus (such as Adenovirus 2), bovine papilloma virus, avian sarcoma virus, cytomegalovirus, a retrovirus, hepatitis-B virus and most preferably Simian Virus 40 (SV40), from heterologous mammalian promoters, e.g., the actin promoter or an immunoglobulin promoter, from heat-shock promoters, provided such promoters are compatible with the host cell systems.

[0282] Transcription of a DNA encoding protein described herein by higher eukaryotes is often increased by inserting an enhancer sequence into the vector. Many enhancer sequences are now known from mammalian genes (globin, elastase, albumin, α-fetoprotein, and insulin). Typically, however, one will use an enhancer from a eukaryotic cell virus. Examples include the SV40 enhancer on the late side of the replication origin (bp 100-270), the cytomegalovirus early promoter enhancer, the polyoma enhancer on the late side of the replication origin, and adenovirus enhancers. See also Yaniv (1982) NATURE, 297:17-18 on enhancing elements for activation of eukaryotic promoters. The enhancer may be spliced into the vector at a position 5′ or 3′ to the peptide-encoding sequence, but is preferably located at a site 5′ from the promoter.

[0283] Expression vectors used in eukaryotic host cells (e.g., yeast, fungi, insect, plant, animal, human, or nucleated cells from other multicellular organisms) will also contain sequences necessary for the termination of transcription and for stabilizing the mRNA. Such sequences are commonly available from the 5′ and, occasionally 3′, untranslated regions of eukaryotic or viral DNAs or cDNAs. These regions contain nucleotide segments transcribed as polyadenylated fragments in the untranslated portion of mRNA encoding the protein described herein. One useful transcription termination component is the bovine growth hormone polyadenylation region.

[0284] In one embodiment, the expression construct comprises a signal sequence operatively linked upstream from the sequences encoding the multimer composition to thereby facilitate secretion of the multimer composition from a host cell.

[0285] The expression construct is introduced into the host cell using a method appropriate to the host cell, as will be apparent to one of skill in the art. A variety of methods for introducing nucleic acids into host cells are known in the art, including, but not limited to, electroporation; transfection employing calcium chloride, rubidium chloride, calcium phosphate, DEAE-dextran, or other substances; microprojectile bombardment; lipofection; and infection (where the vector is an infectious agent).

[0286] Suitable host cells include prokaryotes, yeast, mammalian cells, or bacterial cells. Suitable bacteria include gram negative or gram positive organisms, for example, E. coli or Bacillus spp. Yeast, preferably from the Saccharomyces species, such as S. cerevisiae, may also be used for production of polypeptides. Various mammalian or insect cell culture systems can also be employed to express recombinant proteins. Baculovirus systems for production of heterologous proteins in insect cells are reviewed by Luckow et al. (1988) BIO/TECHNOLOGY, 6:47. Examples of suitable mammalian host cell lines include endothelial cells, COS-7 monkey kidney cells, CV-1, L cells, C127, 3T3, Chinese hamster ovary (CHO), human embryonic kidney cells, HeLa, 293, 293T, and BHK cell lines. Purified polypeptides are prepared by culturing suitable host/vector systems to express the recombinant proteins. For many applications, the small size of many of the polypeptides described herein would make expression in E. coli as the preferred method for expression. The protein is then purified from culture media or cell extracts.

[0287] The host cells used to produce the proteins of this disclosure may be cultured in a variety of media. Commercially available media such as Ham's F10 (Sigma), Minimal Essential Medium ((MEM), (Sigma), RPMI-1640 (Sigma), and Dulbecco's Modified Eagle's Medium ((DMEM), Sigma)) are suitable for culturing the host cells. In addition, many of the media described in Ham et al. (1979) METH. ENZYMOL., 58:44, Barites et al. (1980) ANAL. BIOCHEM., 102:255, U.S. Pat. Nos. 4,767,704, 4,657,866, 4,927,762, 4,560,655, 5,122,469, 6,048,728, 5,672,502, or U.S. Pat. No. RE 30,985 may be used as culture media for the host cells. Any of these media may be supplemented as necessary with hormones and/or other growth factors (such as insulin, transferrin, or epidermal growth factor), salts (such as sodium chloride, calcium, magnesium, and phosphate), buffers (such as HEPES), nucleotides (such as adenosine and thymidine), antibiotics (such as Gentamycin drug), trace elements (defined as inorganic compounds usually present at final concentrations in the micromolar range), and glucose or an equivalent energy source. Any other necessary supplements may also be included at appropriate concentrations that would be known to those skilled in the art. The culture conditions, such as temperature, pH, and the like, are those previously used with the host cell selected for expression, and will be apparent to the ordinarily skilled artisan.

[0288] Proteins described herein can also be produced using cell-free translation systems. For such purposes the nucleic acids encoding the polypeptide must be modified to allow in vitro transcription to produce mRNA and to allow cell-free translation of the mRNA in the particular cell-free system being utilized (eukaryotic such as a mammalian or yeast cell-free translation system or prokaryotic such as a bacterial cell-free translation system).

[0289] Proteins described herein can also be produced by chemical synthesis (e.g., by the methods described in SOLID PHASE PEPTIDE SYNTHESIS, 2ND EDITION, The Pierce Chemical Co., Rockford, Ill. (1984)). Modifications to the protein can also be produced by chemical synthesis.

[0290] The proteins of the present disclosure can be purified by isolation/purification methods for proteins generally known in the field of protein chemistry. For example, an affinity tag (such as His6) can be incorporated into a component of the MHC multimer and the multimer can be purified by affinity chromatography (e.g., immobilized metal affinity chromatography for the His6 tag). Other non-limiting examples of suitable purification methods include immunoaffinity chromatography, extraction, recrystallization, salting out (e.g., with ammonium sulfate or sodium sulfate), centrifugation, dialysis, ultrafiltration, adsorption chromatography, ion exchange chromatography, hydrophobic chromatography, normal phase chromatography, reversed-phase chromatography, get filtration, gel permeation chromatography, electrophoresis, countercurrent distribution or any combinations of these. After purification, polypeptides may be exchanged into different buffers and/or concentrated by any of a variety of methods known to the art, including, but not limited to, filtration and dialysis.

[0291] The purified polypeptide is preferably at least 85% pure, or preferably at least 95% pure, and most preferably at least 98% pure. Regardless of the exact numerical value of the purity, the polypeptide is sufficiently pure for its intended use.

[0292] In certain embodiments, the expression construct includes at least one tag sequence, most typically as at the C-terminal end of the coding region, although inclusion of a tag at the N-terminal end (alternative to or in addition to the C-terminal end) is also encompassed. Suitable tag sequences are known in the art and described further herein.

[0293] Additional tags suitable for use in the methods and compositions provided herein include affinity tags, including but not limited to enzymes, protein domains, or small polypeptides which bind with high specificity to a range of substrates, such as carbohydrates, small biomolecules, metal chelates, antibodies, etc., to allow rapid and efficient purification of proteins. Solubility tags enhance proper folding and solubility of a protein and are frequently used in tandem with affinity tags. Sequences encoding such a tag(s) can be incorporated into an expression construct of the disclosure, such as at the C-terminus or N-terminus of the peptide-multimer-encoding regions to thereby incorporate a detectable tag into the expressed polypeptide.

### B. Chemical Conjugation Preparation of Multimers

[0294] In another embodiment, a multimer composition of the disclosure is produced by covalent conjugation of the MHC moiety (MHCM) to the multimerization moiety. In certain embodiments, a multimer composition is produced by covalent conjugation of the multimerization moiety to the C-terminus of one subunit of an MHC Class I α/β2-microglobulin chain pair or MHC Class II α/β chain pair functioning as the MHCM.

[0295] For chemical conjugation approaches, the MHCM and multimerization moiety polypeptide components can be prepared separately, either recombinantly or chemically. For example, MHC chain pairings (Class I α/β2-microglobulin or Class II α/β), can be expressed using recombinant DNA technology by introducing an expression construct into bacterial cells, insect cells, or mammalian cells, and purifying the recombinant protein from cell extracts, e.g., as described above. The multimerization moiety polypeptide similarly can be prepared recombinantly, prior to conjugation to the MHCM.

[0296] A number of suitable methods for forming covalent bonds between the MHC moiety and the multimerization moiety are provided herein.

### 1. Chemical Bioconjugation

[0297] In some embodiments, the chemical conjugation can be mediated by, for example, by cysteine bioconjugation. In some embodiments, the cysteine bioconjugation is mediated by cysteine alkylation. In some embodiments, the cysteine bioconjugation is mediated by cysteine oxidation. In other embodiments, the cysteine bioconjugation is mediated by a desulfurization reaction. In some embodiments, cysteine bioconjugation is mediated by iodoacetamide. In some embodiments, the cysteine bioconjugation is mediated by maleimide. Methods for utilizing cysteine mediated linkage of two moieties which can be used to produce the multimer composition disclosed herein have been described, for example, see Chalker et al. (2009) CHEM ASIAN J., 4(5):630-40; Spicer et al. (2015) NAT. COMMUN., 5:4740.

[0298] In some embodiments, the multimer compositions are produced by chemical modification of amino acids other than cysteine, including but not limited to lysine, tyrosine, arginine, glutamate, aspartate, serine, threonine, methionine, histidine and tryptophan side-chains, as well as N-terminal amines or C-terminal carboxyls, as previously described (Baslé et al. (2010) M. CHEM. BIOL., 17(3):213-27; Hu et al. (2016) CHEM. SOC. REV., 45(6):1691-719; Lin et al. (2017) SCIENCE, 355(6325):597-602).

### 2. Native Chemical Ligation

[0299] In some embodiments, the multimer compositions are produced by native chemical ligation (NCL), wherein one polypeptide comprises a C-terminal thioester and the other polypeptide comprises an N-terminal cysteine residue, or functional equivalent thereof, wherein the reaction between the cysteine side-chain and the thioester irreversibly forms a native peptide bond, thus ligating the polypeptides together. Methods for NCL have been described in, for example, Hejjaoui et al. (2015) M. PROTEIN SCI., 24(7):1087-99.) Mandal et al. (2012) PROC. NATL. ACAD. SCI. USA., 109(37):14779-84; Torbeev et al. (2013) PROC. NATL. ACAD. SCI. USA., 110(50):20051-6.

[0300] In some embodiments, β- and/or γ-thio amino acids are incorporated into the polypeptides. Desulfurization protocols can then produce the desired native side-chain. In some embodiments, non chemical ligation is performed at an alanine residue. In other embodiments, non chemical ligation is performed at phenylalanine, valine, leucine, threonine, lysine, proline, glutamine, arginine, tryptophan, aspartate, glutamate, and asparagine. Ligation/desulfurization approaches that remove purification steps and increase the yield of ligated products have been described.

### 3. Click Chemistry Mediated Bioorthogonal Conjugation

[0301] In some embodiments, the multimer compositions are produced by bioorthogonal conjugation between a conjugation moiety at the C-terminus of one polypeptide and a conjugation moiety at the N-terminus of the other polypeptide. As used herein, bioorthogonal conjugation refers to any chemical reaction that can occur inside of living systems without interfering with native biochemical processes, including chemical reactions that are chemical reactions that occur in vitro at physiological pH in, or in the presence of water. To be considered bioorthogonal, reactions must be selective and avoid side-reactions with other functional groups found in a given starting compound. In addition, any resulting covalent bond(s) between the reaction partners should be strong and chemically inert to biological reactions and should not affect the biological activity of the desired molecule.

[0302] In some embodiments, the bioorthogonal conjugation is mediated by “click chemistry” (see, e.g., Kolb et al. (2001) ANGEWANDTE CHEMIE INTERNATIONAL EDITION, 40: 2004-2021). The term “click chemistry”, as used herein, refers to a set of reliable and selective bioorthogonal reactions for the rapid synthesis of new compounds and combinatorial libraries. Properties of click reactions include modularity, wideness in scope, high yielding, stereospecificity and simple product isolation (separation from inert by-products by non-chromatographic methods) to produce compounds that are stable under physiological conditions. A “click reaction” can be with copper, or it can be a copper-free click reaction.

[0303] For conjugation of two polypeptides via click chemistry, click chemistry moieties of components have to be reactive with each other, for example, in that the reactive group of a click chemistry moiety on one polypeptide reacts with the reactive group of the second click chemistry moiety on the other polypeptide to form a covalent bond.

[0304] Conjugation moieties suitable for click chemistry, reaction conditions, and associated methods are available in the art (e.g., Kolb et al. (2001) ANGEWANDTE CHEMIE INTERNATIONAL EDITION, 40:2004-2021; Evans (2007) AUSTRALIAN JOURNAL OF CHEMISTRY, 60: 384-395; Lahann (2009) CLICK CHEMISTRY FOR BIOTECHNOLOGY AND MATERIALS SCIENCE, John Wiley & Sons Ltd, ISBN 978-0-470-69970-6). In some embodiments, a click chemistry moiety may comprise or consist of a terminal alkyne, azide, strained alkyne, diene, dieneophile, alkoxyamine, carbonyl, phosphine, hydrazide, thiol, or alkene moiety. In certain embodiments, the azide is a copper-chelating azide. In one embodiment, the copper-chelating azide is a picolyl azide. Reagents for use in click chemistry reactions are commercially available, such as from Click Chemistry Tools (Scottsdale, AZ) or GenScript (Piscataway, NJ).

[0305] In some embodiments, sortase-mediated conjugation is used to install a first click chemistry moiety at one terminus of one polypeptide and a second click chemistry moiety at one terminus of the other polypeptide. Methods of attaching click chemistry moieties utilizing sortase are described, for example, in WO2013/00355. In some embodiments, intein-mediated conjugation is used to install a first click chemistry moiety at one terminus of one polypeptide and a second click chemistry moiety at one terminus of the other polypeptide. Sortase-mediated and intein-mediated conjugation is described further below.

[0306] In some embodiments, the methods of click chemistry mediated covalent conjugation of two polypeptides provided herein comprise native chemical ligation of C-terminal thioesters with β-amino thiols (Xiao J. et al. (2009) ORG. LETT., 11(18):4144-7).

[0307] In some embodiments, the click chemistry used to produce the multimer composition comprises 1,3-dipolar cycloaddition (e.g., the Cu(I)-catalyzed stepwise variant, often referred to simply as the “click reaction”; see, e.g., Tornoe et al. (2002) JOURNAL OF ORGANIC CHEMISTRY, 67: 3057-3064). Copper and ruthenium are the commonly used catalysts in the reaction. The use of copper as a catalyst results in the formation of 1,4-regioisomer whereas ruthenium results in formation of the 1,5-regioisomer.

[0308] In some embodiments, the click chemistry conjugation comprises a cycloaddition reaction, such as the Diels-Alder reaction. In some embodiments, the polypeptides are conjugated by azide-alkyne 1,3-dipolar cycloaddition (“click chemistry). In some embodiments, the cycloaddition is promoted by the presence of Cu(I)-catalyzed cycloaddition (CuAAC).

[0309] In some embodiments, the click chemistry conjugation comprises nucleophilic addition to small strained rings like epoxides and aziridines. In some embodiments, the cycloaddition is promoted by strained cyclooctyne systems, for example, as described in Agard et al. (2004) J. AM. CHEM. SOC., 126(46):15046-7.

[0310] In some embodiments, the click chemistry conjugation comprises nucleophilic addition to activated carbonyl groups.

[0311] In some embodiments, the conjugation of the polypeptides occurs by a bioorthogonal reaction. In some embodiments, the polypeptides are conjugated by inverse-electron demand Diels-Alder reactions between strained dienophiles and tetrazine dienes, for example, as described in Blackman et al. (2008) J. AM. CHEM. SOC., 130(41):13518-9; and Devaraj et al. (2008) BIOCONJUG. CHEM., 19(12):2297-9). In some embodiments, the dienophile is a trans-cyclooctene. In some embodiments, the dienophile is a norbornene.

### 4. Sortase Mediated Conjugation

[0312] In some embodiments, conjugation between two polypeptides is mediated by a cysteine transpeptidase. In some embodiments, the cysteine transpeptidase is a sortase, or enzymatically active fragment thereof. A variety of sortase enzymes have been described and are commercially available (e.g., Antos et al. (2016) CURR. OPIN. STRUCT. BIOL., 38:111-118). Sortases recognize and cleave an amino acid motif, referred to as a “sortag”, to produce a peptide bond between the acyl donor and acceptor site on two polypeptides, resulting in the ligation of different polypeptides which contain N- or C-terminal sortags. In particular, sortases join a C-terminal LPETGG recognition motif (SEQ ID NO: 192) to an N-terminal GGG (oligoglycine) motif.

[0313] Accordingly, in some embodiments, the recognition motif is added to the C-terminus of the MHC moiety and an oligo-glycine motif is added to the N-terminus of the multimerization moiety. Upon addition of sortase to the mixture, the two polypeptides are covalently linked through a native peptide bond.

[0314] Methods of conjugation of sortags into proteins have also been described. (Matsumoto et al. (2016) ACS SYNTH BIOL., 5(11):1284-1289; Williams et al. (2016) PLOS ONE, 11(4):e0154607; and Witte et al. (2012) PROC. NATL. ACAD. SCI. USA., 109(30):11993-8; Mao et al. (2004) J. AM. CHEM. SOC., 126(9):2670-1; Guimaraes et al. (2013) NAT. PROTOC., 8(9):1787-99 and Theile et al. (2013) NAT. PROTOC., 8(9):1800-7).

[0315] In some embodiments, the aminoglycine peptide fragment generated by the sortase reaction, is removed by dialysis or centrifugation, e.g., while the reaction is proceeding (Freiburger et al. (2015) J. BIOMOL. NMR., 63(1):1-8). In some embodiments, affinity immobilization strategies or flow-based platforms are used for the selective removal of reaction components (Policarpo et al. (2014) ANGEW. CHEM. INT. ED. ENGL., 53(35):9203-8).

[0316] In some embodiments, the equilibrium of the reaction can be controlled by ligation product or by-product deactivation, e.g., as described in Yamamura et al. (2011) CHEM. COMMUN. (CAMB)., 47(16):4742-4. In other embodiments, by-products are deactivated by chemical modification of the acyl donor glycine as described, for example, in Liu et al. (2014) J. ORG. CHEM., 79(2):487-92; and Williamson et al. (2014) NAT. PROTOC., 9(2):253-62.

[0317] Exemplary MHCII constructs made using a sortag technique are set forth in SEQ ID NOs.: 221-224 with DRA1 (SEQ ID NO: 205), SEQ ID NOs: 227-228 with DRA1 (SEQ ID NO: 216), and SEQ ID NOs: 230-231 with DRA1 (SEQ ID NO: 216 or 217, respectively).

### 5. Intein-Mediated Conjugation

[0318] Inteins are naturally occurring, self-splicing protein subdomains that are capable of excising out their own protein subdomain from a larger protein structure while simultaneously joining the two formerly flanking peptide regions (“exteins”) together to form a mature host protein. Intein-based methods of protein modification and ligation have been developed. An intein is an internal protein sequence capable of catalyzing a protein splicing reaction that excises the intein sequence from a precursor protein and joins the flanking sequences (N- and C-exteins) with a peptide bond.

[0319] As used herein, the term “split intein” refers to any intein in which one or more peptide bond breaks exists between the N-terminal intein segment and the C-terminal intein segment such that the N-terminal and C-terminal intein segments become separate molecules that can non-covalently reassociate, or reconstitute, into an intein that is functional for splicing or cleaving reactions. Any catalytically active intein, or fragment thereof, may be used to derive a split intein for use in the systems and methods disclosed herein. For example, in one aspect the split intein may be derived from a eukaryotic intein. In another aspect, the split intein may be derived from a bacterial intein. In another aspect, the split intein may be derived from an archaeal intein. Preferably, the split intein so-derived will possess only the amino acid sequences essential for catalyzing splicing reactions.

[0320] As used herein, the “N-terminal intein segment” refers to any intein sequence that comprises an N-terminal amino acid sequence that is functional for splicing and/or cleaving reactions when combined with a corresponding C-terminal intein segment. An N-terminal intein segment thus also comprises a sequence that is spliced out when splicing occurs. An N-terminal intein segment can comprise a sequence that is a modification of the N-terminal portion of a naturally occurring (native) intein sequence. For example, an N-terminal intein segment can comprise additional amino acid residues and/or mutated residues so long as the inclusion of such additional and/or mutated residues does not render the intein non-functional for splicing or cleaving. Preferably, the inclusion of the additional and/or mutated residues improves or enhances the splicing activity and/or controllability of the intein. Non-intein residues can also be genetically fused to intein segments to provide additional functionality, such as the ability to be affinity purified or to be covalently immobilized.

[0321] As used herein, the “C-terminal intein segment” refers to any intein sequence that comprises a C-terminal amino acid sequence that is functional for splicing or cleaving reactions when combined with a corresponding N-terminal intein segment. In one aspect, the C-terminal intein segment comprises a sequence that is spliced out when splicing occurs. In another aspect, the C-terminal intein segment is cleaved from a peptide sequence fused to its C-terminus. A C-terminal intein segment can comprise a sequence that is a modification of the C-terminal portion of a naturally occurring (native) intein sequence. For example, a C terminal intein segment can comprise additional amino acid residues and/or mutated residues so long as the inclusion of such additional and/or mutated residues does not render the C-terminal intein segment non-functional for splicing or cleaving.

[0322] Expressed protein ligation (EPL) refers to a native chemical ligation between a recombinant protein with a C-terminal thioester and a second agent with an N-terminal cysteine. The C-terminal thioester can readily be introduced onto any recombinant protein (i.e., the targeting ligand) through the use of auto-processing, also known as protein-splicing, mediated by an intein (intervening protein). Inteins are proteins that can excise themselves from a larger precursor polypeptide chain, utilizing a process that results in the formation of a native peptide bond between the flanking extein (external protein) fragments. When an auto-processing protein is cloned downstream of the targeting ligand, thiols (e.g., 2-mercaptoethanesulfonic acid, MESNA) can be used to induce the site-specific cleavage of the auto-processing protein, resulting in the formation of a reactive thioester. The thioester will then react with any agent that has an N-terminal cysteine. EPL operates in a site-specific manner, and the reaction is known to be very efficient if both functional groups are in high concentrations. (reviewed in Elias et al. (2010) SMALL, 6:2460-2468).

[0323] Accordingly, in some embodiments, one polypeptide component of the multimer is ligated to an alkynated peptide by expressed protein ligation (EPL) and then conjugated to an azide-labeled second polypeptide of the multimer by Cu(I)-catalyzed terminal azide-alkyne cycloaddition (CuAAC).

[0324] A number of inteins have now been described including, but not limited to MxeGyrA (Frutos et al. (2010); Southworth et al. (1999)); SspDnaE (Shah et al. (2012); Wu et al. (1998)); NpuDnaE (Shah et al. (2012); Vila-Perello et al. (2013)); AvaDnaE (David et al. (2015); Shah et al. (2012)); Cfa (consensus DnaE split intein) (Stevens et al. (2016); gp41-1 and gp41-8 (Carvajal-Vallejos et al. (2012)); NrdJ-1 (Carvajal-Vallejos et al. (2012)); IMPDH-1 (Carvajal-Vallejos et al. (2012)) and AceL-TerL (Thiel et al. (2014)).

[0325] Suitable intein sequences and protocols for use in protein conjugation have been described in the art, such as in Stevens et al. (2016) J. AM. CHEM. SOC., 138, 2162-2165; Shah et al. (2012) J. AM. CHEM. SOC., 134, 11338-11341; and Vila-Perello et al. (2013) J. AM. CHEM. SOC., 135, 286-292; Batjargal et al. (2015) J. AM. CHEM. SOC., 137(5):1734-7; and Guan et al. (2013) BIOTECHNOL. BIOENG., 110(9):2471-81.

### 6. Additional Bioconjugation Methods

[0326] In some embodiments, the conjugation of the polypeptides of the multimer is mediated enzymatically. In some embodiments, the enzyme is formylglycine generating enzyme (FGE) that recognizes the CXPXR amino acid sequence motif and converts the cysteine residue to formylglycine, thus introducing an aldehyde functional group (Wu et al. (2009) PROC. NATL. ACAD. SCI. USA., 106(9):3000-5), which is subjected to bio-orthogonal transformations such as oximation and Hydrazino-Pictet-Spengler reactions (Agarwal et al. (2013) BIOCONJUG. CHEM., 24(6):846-51; Dirksen et al. (2008) BIOCONJUG. CHEM., 19(12):2543-8).

[0327] Site-specific bioconjugation strategies offer many possibilities for directed protein modifications. Among the various enzyme-based conjugation protocols, formylglycine-generating enzymes allow to post-translationally introduce the amino acid Cα-formylglycine (FGly) into recombinant proteins, starting from cysteine or serine residues within distinct consensus motifs. The aldehyde-bearing FGly-residue displays orthogonal reactivity to all other natural amino acids and can, therefore, be used for site-specific labeling reactions on protein scaffolds. (Reviewed in Kruger et al. (2019) BIOL. CHEM., 400(3):289-297).

[0328] Formylglycine generating enzyme (FGE) recognizes a pentapeptide consensus sequence, C×P×R, and it specifically oxidizes the cysteine in this sequence to an unusual aldehyde-bearing formylglycine. The FGE recognition sequence, or aldehyde tag, can be inserted into heterologous recombinant proteins produced in either prokaryotic or eukaryotic expression systems. The conversion of cysteine to formylglycine is accomplished by co-overexpression of FGE, either transiently or as a stable cell line, and the resulting aldehyde can be selectively reacted with α-nucleophiles to generate a site-selectively modified bioconjugate (Rabuka et al. (2012) NAT. PROTOC., 7(6): 1052-1067).

[0329] In some embodiments, the enzyme is lipoic acid ligase, an enzyme that modifies a lysine side-chain within the 13-residue target sequence (Uttamapinant et al. (2010) PROC. NATL. ACAD. SCI. USA, 107(24):10914-9) to introduce bio-orthogonal groups, including azides, aryl aldehydes and hydrazines, p-iodophenyl derivatives, norbornenes, and trans-cyclooctenes (reviewed in Debelouchina et al. (2017) Q. REV. BIOPHYS., 50 e7).

[0330] In other embodiments, the enzyme is biotin ligase, farnesyltransferase, transglutaminase or N-myristoyltransferase (reviewed in Rashidian et al. (2013) BIOCONJUG. CHEM., 24(8):1277-94).

### IV. Pharmaceutical Compositions and Kits

[0331] The multimers can be incorporated into a pharmaceutical composition, formulated together with a pharmaceutically acceptable carrier. Such compositions may include one or a combination of (e.g., two or more different) multimers. The multimer pharmaceutical composition also can be used in combination with other therapeutics agents, or other therapeutic modalities, in a subject (so-called combination therapy that combines two or more treatment approaches).

[0332] Preferably, in some embodiments, the carrier is suitable for intravenous, intramuscular, subcutaneous, parenteral, spinal or epidermal administration (e.g., by injection or infusion).

[0333] The pharmaceutical composition also may include one or more pharmaceutically acceptable salts. A “pharmaceutically acceptable salt” refers to a salt that retains the desired biological activity of the parent compound and does not impart any undesired toxicological effects (see e.g., Berge et al. (1977) J. PHARM. SCI., 66:1-19). Non-limiting examples of such salts include acid addition salts and base addition salts. Acid addition salts include those derived from nontoxic inorganic acids, such as hydrochloric, nitric, phosphoric, sulfuric, hydrobromic, hydroiodic, phosphorous and the like, as well as from nontoxic organic acids such as aliphatic mono- and dicarboxylic acids, phenyl-substituted alkanoic acids, hydroxy alkanoic acids, aromatic acids, aliphatic and aromatic sulfonic acids and the like. Base addition salts include those derived from alkaline earth metals, such as sodium, potassium, magnesium, calcium and the like, as well as from nontoxic organic amines, such as N,N′-dibenzylethylenediamine, N-methylglucamine, chloroprocaine, choline, diethanolamine, ethylenediamine, procaine and the like.

[0334] The pharmaceutical composition also may include a pharmaceutically acceptable anti-oxidant. Examples of pharmaceutically acceptable antioxidants include: (1) water soluble antioxidants, such as ascorbic acid, cysteine hydrochloride, sodium bisulfate, sodium metabisulfite, sodium sulfite and the like; (2) oil-soluble antioxidants, such as ascorbyl palmitate, butylated hydroxyanisole (BHA), butylated hydroxytoluene (BHT), lecithin, propyl gallate, α-tocopherol, and the like; and (3) metal chelating agents, such as citric acid, ethylenediamine tetraacetic acid (EDTA), sorbitol, tartaric acid, phosphoric acid, and the like.

[0335] Examples of suitable aqueous and nonaqueous carriers that may be employed in the pharmaceutical compositions of the disclosure include water, ethanol, polyols (such as glycerol, propylene glycol, polyethylene glycol, and the like), and suitable mixtures thereof, vegetable oils, such as olive oil, and injectable organic esters, such as ethyl oleate. Proper fluidity can be maintained, for example, by the use of coating materials, such as lecithin, by the maintenance of the required particle size in the case of dispersions, and by the use of surfactants.

[0336] The pharmaceutical compositions may also contain adjuvants such as preservatives, wetting agents, emulsifying agents and dispersing agents. Prevention of presence of microorganisms may be ensured both by sterilization procedures, supra, and by the inclusion of various antibacterial and antifungal agents, for example, paraben, chlorobutanol, phenol sorbic acid, and the like. It may also be desirable to include isotonic agents, such as sugars, sodium chloride, and the like into the compositions. In addition, prolonged absorption of the injectable pharmaceutical form may be brought about by the inclusion of agents which delay absorption such as aluminum monostearate and gelatin.

[0337] Therapeutic compositions typically must be sterile and stable under the conditions of manufacture and storage. The composition can be formulated as a solution, microemulsion, liposome, or other ordered structure suitable to high drug concentration. The carrier can be a solvent or dispersion medium containing, for example, water, ethanol, polyol (for example, glycerol, propylene glycol, and liquid polyethylene glycol, and the like), and suitable mixtures thereof. The proper fluidity can be maintained, for example, by the use of a coating such as lecithin, by the maintenance of the required particle size in the case of dispersion and by the use of surfactants. In many cases, it will be preferable to include isotonic agents, for example, sugars, polyalcohols such as mannitol, sorbitol, or sodium chloride in the composition.

[0338] Sterile injectable solutions can be prepared by incorporating the active compound in the required amount in an appropriate solvent with one or a combination of ingredients enumerated above, as required, followed by sterilization microfiltration. Generally, dispersions are prepared by incorporating the active compound into a sterile vehicle that contains a basic dispersion medium and the required other ingredients from those enumerated above. In the case of sterile powders for the preparation of sterile injectable solutions, the preferred methods of preparation are vacuum drying and freeze-drying (lyophilization) that yield a powder of the active ingredient plus any additional desired ingredient from a previously sterile-filtered solution thereof.

[0339] The amount of active ingredient which can be combined with a carrier material to produce a single dosage form will vary depending upon the subject being treated, and the particular mode of administration. The amount of active ingredient which can be combined with a carrier material to produce a single dosage form will generally be that amount of the composition which produces a therapeutic effect. Generally, out of one hundred percent, this amount will range from about 0.01 percent to about ninety-nine percent of active ingredient, preferably from about 0.1 percent to about 70 percent, most preferably from about 1 percent to about 30 percent of active ingredient in combination with a pharmaceutically acceptable carrier.

[0340] Dosage regimens are adjusted to provide the optimum desired response (e.g., a therapeutic response). For example, a single bolus may be administered, several divided doses may be administered over time or the dose may be proportionally reduced or increased as indicated by the exigencies of the therapeutic situation. It is especially advantageous to formulate parenteral compositions in dosage unit form for ease of administration and uniformity of dosage. Dosage unit form as used herein refers to physically discrete units suited as unitary dosages for the subjects to be treated; each unit contains a predetermined quantity of active compound calculated to produce the desired therapeutic effect in association with the required pharmaceutical carrier. The specification for the dosage unit forms are dictated by and directly dependent on (a) the unique characteristics of the active compound and the particular therapeutic effect to be achieved, and (b) the limitations inherent in the art of compounding such an active compound for the treatment of sensitivity in individuals.

[0341] Pharmaceutical compositions can be administered via one or more routes of administration using one or more of a variety of methods known in the art. As will be appreciated by the skilled artisan, the route and/or mode of administration will vary depending upon the desired results.

[0342] Preferred routes of administration for multimers of the disclosure include intratumoral, intravenous, intramuscular, intradermal, intraperitoneal, subcutaneous, spinal or other parenteral routes of administration, for example by injection or infusion. The phrase “parenteral administration” as used herein means modes of administration other than enteral and topical administration, usually by injection, and includes, without limitation, intratumoral, intravenous, intramuscular, intraarterial, intrathecal, intracapsular, intraorbital, intracardiac, intradermal, intraperitoneal, transtracheal, subcutaneous, subcuticular, intraarticular, subcapsular, subarachnoid, intraspinal, epidural, and intrasternal injection and infusion.

[0343] In another aspect, the disclosure provides kits comprising a multimer, e.g., for use in the methods described herein. Any of the compositions of the disclosure can be formulated into a kit, including the components, typically packaged in one or more containers, along with instructions for use of the components for the desired use. For example, in one embodiment, the disclosure provides a kit comprising at least one multimer composition packaged in a container, along with instructions for use of the multimer, e.g., for detecting pMHC-TCR interactions or for immunomodulation. In another embodiment, the kit comprises at least one expression construct for expressing a multimer of the disclosure, typically packaged in a container, along with instructions for use of the construct(s), e.g., for expression of a multimer in a host cell. In some embodiments, a kit comprises components for constructing a multimer, such as, e.g., one or more plasmids encoding one or more constructs as provided herein, that can be transfected into a host to generate a multimer.

### V. Methods of Use

[0344] Multimers of the disclosure can be used in a variety of in vitro and in vivo methods, as research reagents, for diagnostic purposes and for therapeutic uses, based on the binding specificity of the multimers and on the effector functions of the multimers.

[0345] Since the MHC moiety of a provided multimer is designed to be recognized by T cell receptors, in some embodiments, the multimers can be used to detect TCR-peptide-MHC complex interactions. In another aspect, the present disclosure provides methods of detecting a TCR-peptide-MHC interaction, the method comprising contacting a TCR with a multimer of the disclosure and detecting binding of the TCR to the peptide-MHC complex of the MHC moiety of the multimer to thereby detect the TCR-peptide-MHC interaction. In some embodiments, detection is used as a diagnostic for one or more diseases. In addition to use in detection, compositions comprising MHC multimers may be used for therapeutic purposes such as for treatment of one or more diseases or disorders in a subject in need thereof.

### A. TCR Localization and Specificity

[0346] In one embodiment, the TCR is on the surface of a cell, e.g., a T cell, and the multimer is contacted with the T cell to thereby contact the multimer with the TCR on the T cell. In another embodiment, the TCR is fixed to a solid support, such as a plate or a bead. In another embodiment, the peptide-MHC complex is fixed to a solid support, such as a plate, bead, tips, or other solid surface. In some such embodiments, the complex is fixed to the solid support indirectly, such as, for example, through another agent such as, e.g., streptavidin. In yet another embodiment, the TCR is soluble. Binding of the multimer to the TCR can be detected by standard methods known in the art, e.g., by labeling the multimer with a detectable label and then detecting the amount of label associated with the TCR. Alternatively, the TCR can be labeled with a detectable label and then the amount of label associated with the multimer can be detected.

[0347] In one embodiment, the MHC moiety of the multimer has a known TCR specificity and the method can be used to detect that particular TCR in a sample, e.g., for research purposes or on the surface of patient cells for the purposes of characterizing a patient's T cell population or diagnosing a patient as having an autoimmune disorder with a particular TCR reactivity.

[0348] In another embodiment, the detection method can be used to analyze the binding specificity of the MHC moiety using in the multimer. For example, an MHC molecule whose antigenic specificity is unknown can be used in the MHC moiety to determine the binding specificity of the MHC moiety using the detection method.

### B. Targeting Specific T Cell Populations

[0349] The present disclosure provides the insight that pMHC-multimers can be coupled to certain effector/targeting moieties to target changes to specific populations of T cells.

[0350] T cells as disclosed herein can be from a T cell subpopulation defined by, e.g., function, activation state, maturity, potential for differentiation, expansion, recirculation, localization, and/or persistence capacities, antigen specificity, type of antigen receptor, presence in a particular organ or compartment, marker or cytokine secretion profile, and/or degree of differentiation. For example, in some embodiments subpopulations of T cells are naive T (Tn) cells, effector T cells (Teff), memory T cells and sub-types thereof, such as stem cell memory T (Tscm), central memory T (Tcm), effector memory T (Tem), or terminally differentiated effector memory T cells, tumor-infiltrating lymphocytes (TIL), immature T cells, mature T cells, helper T cells, cytotoxic T cells, mucosa-associated invariant T (MALT) cells, naturally occurring and adaptive regulatory T (Treg) cells, helper T cells (e.g., TH1 cells, TH2 cells, TH3 cells, TH17 cells, TH9 cells, TH22 cells, follicular helper T cells), natural killer T (NKT) cells, alpha(α)/beta(β) T cells, and gamma(γ)/delta(δ) T cells. T cells can be characterized by the expression of certain cell surface molecules such as the T cell receptor (TCR), a multiprotein complex that is involved in MHC binding.

[0351] In some embodiments, T cells will be targeted by using pMHC multimers coupled to effector/targeting moieties that act either in cis (i.e., directly on target T cells) or in trans (i.e., to engage or impact a population of cells that then acts on T cells). Particular tissues or T cell populations to be targeted and effector/targeting moieties chosen will depend on context and desired outcome. For instance, in accordance with technologies provided by the present disclosure, a population of T cells (e.g., epitope-specific T cells) may be targeted for inhibition, exhaustion, anergization, and/or depletion. Without wishing to be bound by theory, in some embodiments, such suppressive signals may be useful in modulating T cells (e.g., effector T cells, helper T cells) that attack a self tissue, thereby to treat an autoimmune disease. In another embodiment, a population of T cells (e.g., epitope-specific T cells) may be targeted for support (e.g., survival), expansion, activation, and/or memory formation. The present disclosure also contemplates that in some such embodiments, such activation or activating signals are useful in stimulating T cells (e.g., effector T cells, helper T cells) that attack undesired cells or tissues, such as cancer cells, thereby treating cancer. Alternatively or additionally, where target T cells include regulatory T cells, such activating signals may be used to induce tolerance to selected epitopes, such as autoimmunity-associated epitopes, thereby to treat autoimmune diseases.

### 1. Therapeutic Multimers for Treating Autoimmune Diseases

[0352] i. Inhibiting and/or Exhausting T Effector Cells by Cis pMHC-Mediated Targeting

[0353] In some embodiments, the present disclosure provides technologies that can be used to treat autoimmune disease.

[0354] For example, in a context of autoimmunity, specific self-reactive T effector cells may be targeted using a pMHC multimer coupled to an effector/targeting moiety. In some such embodiments, the effector/targeting moiety provides or acts to induce a signal that inhibits activity or, first activates the T effector, but with chronic activation, induces self-reactive T cells (i.e., those attacking self-tissue) into an exhausted state. For example, without being bound by any particular theory, the present disclosure contemplates that even if a population of T cells experiences an initial activation upon binding of an effector/targeting moiety, upon continued exposure, undesirable T cells will be exhausted and no longer able to attack the tissue of a subject suffering from an autoimmune disease.

[0355] In some embodiments, specific populations of T cells (e.g., effector T cells) are targeted for inhibition or exhaustion in a cis approach using an pMHC multimer coupled to an effector/targeting moiety as provided herein. In some such embodiments, the effector/targeting moiety comprises one or more of a checkpoint protein agonist, a TNFR superfamily agonist (e.g., a TNF superfamily member), or an anti-inflammatory cytokine, or binding fragment (e.g., an antigen-binding fragment) thereof. For example, in some embodiments, an effector/targeting moiety may be or comprise a PD-L1 extracellular domain or domain 1, anti-PD1 agonist antibody, anti-CTLA4 agonist antibody, anti-Lag3 agonist antibody, anti-TIM3 agonist antibody, anti-TIGIT agonist, 4-1BBL (CD137L), anti-CD137 agonist antibody, HLA-G, anti-LILRB1 agonist antibody, anti-LILRB2 agonist antibody, IL10, TGFβ or an antigen-binding fragment thereof (e.g., that can bind and/or act on a targeted T cell, e.g., agonistic binding).

[0356] Immunosuppression or exhaustion may be assessed by, among other things, evaluating ability to chronically reduce TCR signaling, proliferation, cytokine secretion, or cell killing by pMHC-multimer targeted, antigen-specific effector T cells, as illustrated in an exemplary schematic (see FIG. 7) and further described in Example 7.

ii. Killing or Inducing Apoptosis of T Effector Cells by Cis pMHC-Mediated Targeting

[0357] In some embodiments, self-antigen-specific T cells may be targeted to induce cell death, whether by apoptosis or other mechanisms. For example, by using a pMHC multimer comprising an effector/targeting moiety where the effector/targeting moiety triggers or causes cell toxicity, damage (e.g., inducing programmed cell death), or causes death by another pathway, T effector cells that are attacking self-tissue can be eliminated. For example, in some embodiments, a pMHC multimer may comprise an effector/targeting moiety comprising FasL, an anti-Fas agonist antibody domain, a tubulin inhibitor, a DNA damaging agent, or any or any portion or component thereof that can bind or be delivered to act on a targeted T cell.

[0358] To give but one example, pMHC multimers comprising an effector/targeting moiety comprising FasL or anti-Fas agonist peptide can be used to trigger apoptosis in effector T cells. In such an example, a pMHC multimer coupled to a FasL or anti-Fas agonist peptide can be co-incubated with a mix of antigen- and non-antigen-specific T cells. Antigen-specific T cells should be particularly targeted for delivery of the effector/targeting moiety on the pMHC multimer, thus, specifically eliminated from the T cell population, relieving the autoimmune attack. One way to evaluate impact of such a strategy is to use differential labeling techniques (such as using a discriminating anti-HLA label) can be employed to determine relative numbers of each cell type (e.g., using flow cytometry). In addition, markers such as Annexin V or propidium iodide, and/or counts/relative amounts of certain antigen specific T cells can determine if apoptosis has selectively and/or successfully been induced (see, e.g., schematic at FIG. 8 for an exemplary approach).

[0359] Another approach for eliminating targeting specific T cell populations includes using a pMHC multimer coupled to a cytotoxic drug. For example, a pMHC multimer can be coupled to a cytotoxic agent such as a tubulin inhibitor or DNA damaging agent. The pMHC multimer comprising a cytotoxic effector moiety can be co-incubated with a mix of antigen-specific and antigen-non-specific T cells. The present disclosure contemplates that when such a multimer is incubated with a mixture of T-cells, the pMHC multimer will be taken up by the antigen-specific T cells and the cytotoxic effector moiety will only impact that population, leaving the non-antigen-specific T cells. Cells can be evaluated using exemplary strategies such as shown in the schematic of FIG. 9, where, for instance, differential labeling techniques (such as using a discriminating anti-HLA label) can be employed to determine relative numbers of each cell type (e.g., using flow cytometry) present and/or markers such as Annexin V or propidium iodide, and/or counts/relative amounts of certain populations of T cells (antigen-specific and antigen non-specific) can be used to determine if apoptosis has selectively and/or successfully been induced in a targeted population.

iii. Killing T Effector Cells by Trans pMHC-Mediated Targeting to Recruit Other Immune Cell Populations

[0360] In some embodiments, self-antigen-specific T effector cells may be depleted by using a pMHC multimer comprising an effector/targeting moiety that binds an immune effector cell (e.g., T cell, NK cell). This is a trans approach, which indirectly acts on a target T cell by facilitating the formation of an immunological synapse between an immune effector cell and a T cell targeted by the pMHC, thereby to kill the target T cell. For example, in some embodiments, the effector/targeting moiety comprises a binding domain (e.g., an antibody or an antigen-binding fragment thereof) that binds a T cell surface protein, such as CD3, CD2, or CD8. In a specific embodiment, the effector/targeting moiety comprises an anti-CD3 antibody or an antigen-binding fragment thereof. Such peptide-MHC multimer (e.g., peptide-MHC-Ig multimer) fusion protein can engage effector T cells to antigen-specific T cells, where the pMHC multimer is targeted to the antigen-specific T cells, and the anti-CD3 domain engages the other T cells (e.g., effector T cells), which kill the antigen-specific T cell via secretion of perforin, granzyme and other mechanisms (FIG. 10). Differential labeling of the different cells (CFSE or, for instance, a discriminating anti-HLA antibody) can be used to determine relative number of each cell type by flow, and the loss of the antigen-specific T cells caused by the peptide-MHC-αCD3 multimer can be assessed. In some embodiments, the effector/targeting moiety comprises a binding domain (e.g., an antibody or an antigen-binding fragment thereof) that binds an NK cell surface protein, such as NKp46, CD16a, CD56, NKG2D, NKp30, or CD64. Such peptide-MHC multimer (e.g., peptide-MHC-Ig multimer) fusion protein can engage NK cells to antigen-specific T cells, thereby to kill the antigen-specific T cell via secretion of perforin, granzyme and other mechanisms.

iv. Reprogramming, Amplifying, or Supporting T Regulatory Cells by Targeting in Cis

[0361] In some embodiments, specific populations of T cells may be targeted for support, amplification of response, or for reprogramming. For instance, in some embodiments, regulatory T cells are targeted and provided support using an pMHC multimer coupled to an effector/targeting moiety comprising an IL-2 mutein (e.g. that has reduced or no binding affinity for CD25/ILR2α) or TGF-β, or a variant of any of these cytokines, or an anti-TNFR2 agonist (e.g., an antigen-binding antibody fragment). Stimulation of regulatory T cells can modulate immunity against a self tissue, thereby to treat an autoimmune disease.

[0362] Among other things, the present disclosure also contemplates that, in some embodiments, MHC multimers can downmodulate an autoimmune response by reprogramming cognate antigen-experienced CD4+ cells into disease-suppressing T-regulatory type 1 (TR1) cells. In some embodiments, the MHC multimer comprises an effector/targeting moiety that promotes immunosuppression and/or induction of TR1 cells. Non-limiting examples of such targeting moieties are described herein and include TGFβ, FasL, TNFR2 and IL-10. In some embodiments, Treg or TR1-promoting cytokines include IL-10 or Treg-focused IL-2.

v. Combining Expansion of T Regulatory Cells and Killing of T Effector Cells

[0363] Depending on circumstances, in some embodiments, autoimmune disease may be treated by amplifying activity or expanding a particular population of T cells, such as T regulatory cells. In some embodiments, for instance, a pMHC multimer coupled to an effector/targeting moiety to provide a specific tolerizing or stimulatory signal. For example, in some embodiments, T regulatory cells can be targeted for expansion and/or effector T cells targeted for cell death simultaneously or sequentially. To give but one example, in some embodiments, a pMHC multimer coupled to an effector/targeting moiety can act in one way on one type of cells (e.g., T regs) and another way on a different type of cells (e.g., T effs). In some embodiments, an effector/targeting moiety may comprise TRAIL, anti-TRAILR1 agonist antibody domain, anti-TRAILR2 agonist antibody domain, TGRβ, TNFR2 agonists, or any portion or fragment thereof that can bind and act on a T cell receptor of a targeted T cell. In certain embodiments, if two different peptides are expressed on, e.g., a single IgM, it may be possible to eliminate/deplete/anergize T cells that recognize either epitope (i.e. of the two expressed peptides). Cell populations may be assessed to determine relative abundance of certain cell types (e.g., T regulatory cells, T effectors) by using cell markers (e.g., Foxp3, CD25) depending on context and cell type targeted and/or desired. (FIG. 11).

### 2. Therapeutic Multimers for Treating Cancer

[0364] i. pMHC Multimers to Enhance T Effector Cell Activity in Cancer

[0365] The present disclosure provides the insight that pMHC multimers may also be used to treat cancer. For example, in some embodiments, the present disclosure contemplates that amplification (e.g., activation, proliferation, etc.) of effector T cells (e.g., effector T cells that recognize a cancer cell surface peptide-MHC are useful in treatment of cancer. Accordingly, in some embodiments, a multimer comprises an effector/targeting moiety, which effector/targeting moiety is used to enhance T effector cell activity. Without wishing to be bound by theory, in some such embodiments, enhancement of a specific population of T effector cell activity causes cells to attack a population of cancer cells (e.g., a tumor). In some embodiments, by way of non-limiting example, an effector/targeting moiety is or comprises IL-12, IL-15, or a variant of any of these cytokines (e.g., an IL-2 mutein with reduced or no binding affinity for CD25/IL2Rα), an anti-CD28 antibody, an anti-CD40L antibody, an anti-4-1BB antibody, or an antigen-binding fragment of any of these antibodies, thereby to enhance the activity of the T effector cell. In some embodiments, an effector/targeting moiety is or comprises an antagonist anti-PD1, anti-TIGIT, anti-CTLA4, anti-TIM3, anti-Lag3, anti-LILRB1, or anti-LILRB2 antibody or an antigen-binding fragment of any of these antibodies, thereby to enhance the activity of the T effector cell.

### 3. Therapeutic Proteins for Treating Infection

[0366] i. pMHC Multimers to Enhance T Effector Cell Activity in Infectious Diseases

[0367] The present disclosure provides the insight that pMHC multimers may also be used to treat infection (e.g., a viral infection). For example, in some embodiments, the present disclosure contemplates that amplification (e.g., activation, proliferation, etc.) of effector T cells (e.g., effector T cells that recognize an infectious epitope presented by an infected cell such as, for example, a viral epitope), can be used to target infected cells. Accordingly, in some embodiments, a multimer comprises an effector/targeting moiety, which effector/targeting moiety is used to enhance T effector cell activity. Without wishing to be bound by theory, in some such embodiments, enhancement of a specific population of T effector cell activity causes cells to attack a population of infected cells (e.g., virally-infected cells)._In some embodiments, by way of non-limiting example, an effector/targeting moiety is or comprises IL-2, IL-12, IL-15, or a variant of any of these cytokines, an anti-CD28 antibody, an anti-CD40L antibody, an anti-4-1BB antibody, or an antigen-binding fragment of any of these antibodies, thereby to enhance the activity of the T effector cell.

[0368] In some embodiments, an effector/targeting moiety is or comprises an antagonist anti-PD1, anti-TIGIT, anti-CTLA4, anti-TIM3, anti-Lag3, anti-LILRB1, or anti-LILRB2 antibody or an antigen-binding fragment of any of these antibodies, thereby to enhance the activity of the T effector cell.

### 4. Therapeutic Proteins for Treating Autoimmune Diseases or Cancer

[0369] i. Combinations for Targeting Multiple Populations

[0370] The present disclosure also contemplates that targeting one or more populations of T cells using distinct mechanisms with distinct effector/targeting moieties can be accomplished using multiple compositions, each composition comprising a distinct pMHC multimer formulation. For example, in some embodiments, one population of T cells may be targeted for expansion and one targeted for cell death and each targeted by a distinct pMHC multimer coupled to an effector capable of supporting or killing particular T cells. In some embodiments, such an approach may be used in treatment of autoimmune diseases or in cancers.

### C. Administration

[0371] When used therapeutically, the MHC multimers can be administered to a subject (e.g., intravenously or intramuscularly) to modulate an immune response in the subject. Accordingly, in another aspect, the disclosure pertains to a method of modulating an immune response in a subject, the method comprising administering to the subject an MHC multimer of the disclosure such that an immune response is modulated in the subject. Modulation of an immune response in the subject results from the combination of the binding of the peptide-MHC moiety to its target TCRs in a multivalent manner (due to the multivalency of the multimer) and the effector functions mediated by the IgM or IgA C regions within the multimerization domain, such as complement-mediated cytotoxicity, as well as any effector functions mediated by an effector/targeting moiety and/or additional functional moiety included in the MHC multimer. For example, inclusion of a PD-L1-binding effector/targeting moiety can redirect (e.g., exhaust) endogenous T cells to the MHC multimers or MHC-multimer-bound target cell in vivo; the endogenous T cells are then modulated in the subject (e.g., endogenous antigen-specific T cells that recognize the MHC multimers are exhausted), thereby modulating an immune response.

[0372] In some embodiments, compositions provided by the present disclosure are administered in vivo or ex vivo. In some embodiments, compositions are administered subcutaneously, intramuscularly, or intravenously. In some embodiments, compositions are administered by targeted injection into a particular site (e.g., an inflamed tissue or organ, e.g., a tumor).

[0373] In certain embodiments, a method or composition provided herein, is administered in combination with one or more additional therapies, e.g., surgery, radiation therapy, anti-inflammatory therapy, biologic therapy, etc. In some embodiments, the additional therapy may include chemotherapy, e.g., a cytotoxic agent. In some embodiments the additional therapy may include a targeted therapy, e.g., a tyrosine kinase inhibitor, a proteasome inhibitor, or a protease inhibitor. In some embodiments, the additional therapy may include an anti-inflammatory, anti-angiogenic, anti-fibrotic, or anti-proliferative compound, e.g., a steroid, a biologic immunomodulator, a disease modifying anti-rheumatic drug, a monoclonal antibody, an antibody fragment, an aptamer, an siRNA, an antisense molecule, a fusion protein, a cytokine, a cytokine receptor, a bronchodilator, a statin, an anti-inflammatory agent (e.g., methotrexate), or an NSAID. In certain embodiments, the additional therapy may include a combination of therapeutics of different classes.

[0374] In some embodiments, one or more agents administered in combination with one another may be administered in one or more doses. In some embodiments, administration of a combination of two or more agents can be sequential or concomitant.

### D. Diseases

[0375] The present disclosure provides the insight that one or more immune-mediated disease, such as autoimmune disease, inflammatory disease, and/or cancer, may be detected, diagnosed, and/or treated using a composition comprising an MHC multimer as provided herein.

[0376] In one embodiment, an MHC multimer of the disclosure is administered to a subject with an autoimmune disease or disorder to downmodulate the autoimmune response in the subject. Accordingly, in one embodiment, the method comprises administering to the subject an MHC multimer of the disclosure wherein the peptide-MHC moiety of the multimer is recognized by autoimmune T cells of the subject.

[0377] In various embodiments, the autoimmune disease is one of the following (with known disease-associated HLA alleles shown in parentheses): Type I diabetes (HLA-DQ2, HLA-DQ8), celiac disease (HLA-DQ2, HLA-DQ8), primary sclerosing cholangitis (HLA-DR8, HLA-DRB1), vitiligo and autoimmune skin diseases (HLA-B27), atopic dermatitis (HLA-DRB1), rheumatoid arthritis, psoriatic arthritis, and ulcerative colitis, ankylosing spondylitis, Crohn's disease, inflammatory bowel disease, Alzheimer's disease, uveitis, psoriasis, scleroderma, lupus erythematosus, Parkinson's disease, amyotrophic lateral sclerosis, autoimmune hepatitis, primary biliary cholangitis, Sjogren's syndrome, narcolepsy, multiple sclerosis, alopecia areata, Grave's disease, Addison's disease, Hashimoto's disease, Myasthenia gravis, neuromyelitis optica, pemphigus vulgaris, bullous pemphigoid, myelin oligodendrocyte glycoprotein antibody-associated disease and acquired factor VIII deficiency. In one embodiment, the autoimmune disease is Type I diabetes. In one embodiment, the peptide used in the MHC multimer is a Type I diabetes-associated peptide, such as an insulin peptide.

[0378] In some embodiments, a pMHC multimer of the disclosure is administered to a subject with an infectious disease. Accordingly, in some such embodiments, the method comprises administering to the subject a pMHC multimer of the disclosure wherein the MHC moiety of the multimer is recognized by immune cells of the subject and, in some embodiments, can act either in cis or trans to directly bind to a target cell, or to recruit another population of cells to impact a target cell population and treat the infection. In some embodiments, the infectious disease is bacterial. In some embodiments, the infectious disease is viral.

[0379] In another embodiment, an MHC multimer is administered to a subject with cancer and modulates the immune response to the cancer in the subject. In some embodiments, the present disclosure provides a method of treating cancer using an immunotherapy comprising a pMHC multimer comprising an effector/targeting moiety. In some such embodiments, the effector/targeting moiety modulates one or more immune cell populations to treat the cancer, such as by amplifying an anti-tumor response or depleting or suppressing tumor cells. Accordingly, in one embodiment, the method comprises administering to the subject an MHC multimer of the disclosure wherein the peptide-MHC moiety of the MHC multimer is recognized by T cells (e.g., cancer-specific T cells) of the subject. In one embodiment, the MHC multimer includes an effector/targeting moiety. In one embodiment, the effector/targeting moiety is an activating agent, e.g., an agent that expands tumor-reactive T cells. Non-limiting examples of such activating targeting moieties include IL-2 or muteins thereof (e.g., an IL2 mutein with reduced or no binding affinity for CD25/IL2Rα), IL12, IL15, anti-CD28 antibody domain, anti-CD40L antibody domain, anti-4-1BB antibody domain, CD80, CD86, and 4-1BBL. In another embodiment, the effector/targeting moiety is an inhibitory agent, e.g., an immunosuppressive agent and/or an agent that selectively inhibits Tregs. Non-limiting examples of such inhibitory targeting moieties include PD-L1, FasL and TGFβ and others provided herein. Additionally or alternatively, the subject can be treated with additional anti-cancer agents, including chemotherapeutic agents, immunotherapy agents and immune checkpoint inhibitors.

[0380] In some embodiments, the cancer is or comprises a solid tumor. In some embodiments, the cancer is a hematological cancer.

[0381] For example, in certain embodiments, the cancer is brain cancer, bladder cancer, breast cancer, cervical cancer, colon cancer, colorectal cancer, endometrial cancer, esophageal cancer, leukemia, lung cancer, liver cancer, melanoma, ovarian cancer, pancreatic cancer, prostate cancer, rectal cancer, renal cancer, stomach cancer, testicular cancer, or uterine cancer, squamous cell carcinoma, adenocarcinoma, small cell carcinoma, melanoma, glioma, neuroblastoma, sarcoma (e.g., an angiosarcoma or chondrosarcoma), larynx cancer, parotid cancer, biliary tract cancer, thyroid cancer, acral lentiginous melanoma, actinic keratoses, acute lymphocytic leukemia, acute myeloid leukemia, adenoid cystic carcinoma, adenomas, adenosarcoma, adenosquamous carcinoma, anal canal cancer, anal cancer, anorectum cancer, astrocytic tumor, bartholin gland carcinoma, basal cell carcinoma, biliary cancer, bone cancer, bone marrow cancer, bronchial cancer, bronchial gland carcinoma, carcinoid, cholangiocarcinoma, chondosarcoma, choroid plexus papilloma/carcinoma, chronic lymphocytic leukemia, chronic myeloid leukemia, clear cell carcinoma, connective tissue cancer, cystadenoma, digestive system cancer, duodenum cancer, endocrine system cancer, endodermal sinus tumor, endometrial hyperplasia, endometrial stromal sarcoma, endometrioid adenocarcinoma, endothelial cell cancer, ependymal cancer, epithelial cell cancer, Ewing's sarcoma, eye and orbit cancer, female genital cancer, focal nodular hyperplasia, gallbladder cancer, gastric antrum cancer, gastric fundus cancer, gastrinoma, glioblastoma, glucagonoma, heart cancer, hemangiblastomas, hemangioendothelioma, hemangiomas, hepatic adenoma, hepatic adenomatosis, hepatobiliary cancer, hepatocellular carcinoma, Hodgkin's disease, ileum cancer, insulinoma, intaepithelial neoplasia, interepithelial squamous cell neoplasia, intrahepatic bile duct cancer, invasive squamous cell carcinoma, jejunum cancer, joint cancer, Kaposi's sarcoma, pelvic cancer, large cell carcinoma, large intestine cancer, leiomyosarcoma, lentigo maligna melanomas, lymphoma, male genital cancer, malignant melanoma, malignant mesothelial tumors, medulloblastoma, medulloepithelioma, meningeal cancer, mesothelial cancer, metastatic carcinoma, mouth cancer, mucoepidermoid carcinoma, multiple myeloma, muscle cancer, nasal tract cancer, nervous system cancer, neuroepithelial adenocarcinoma nodular melanoma, non-epithelial skin cancer, non-Hodgkin's lymphoma, oat cell carcinoma, oligodendroglial cancer, oral cavity cancer, osteosarcoma, papillary serous adenocarcinoma, penile cancer, pharynx cancer, vascularized tumor, pituitary tumor, plasmacytoma, pseudosarcoma, pulmonary blastoma, rectal cancer, renal cell carcinoma, respiratory system cancer, retinoblastoma, rhabdomyosarcoma, sarcoma, serous carcinoma, sinus cancer, skin cancer, small cell carcinoma, small intestine cancer, smooth muscle cancer, soft tissue cancer, somatostatin-secreting tumor, spine cancer, squamous cell carcinoma, striated muscle cancer, submesothelial cancer, superficial spreading melanoma, tongue cancer, undifferentiated carcinoma, ureter cancer, urethra cancer, urinary bladder cancer, urinary system cancer, uterine cervix cancer, uterine corpus cancer, uveal melanoma, vaginal cancer, verrucous carcinoma, VIPoma, vulva cancer, well differentiated carcinoma, or Wilms tumor, T cell leukemia, or non-Hodgkin's lymphoma (such as a B-cell lymphoma or a T-cell lymphoma). In certain embodiments, the non-Hodgkin's lymphoma is a B-cell lymphoma, such as a diffuse large B-cell lymphoma, primary mediastinal B-cell lymphoma, follicular lymphoma, small lymphocytic lymphoma, mantle cell lymphoma, marginal zone B-cell lymphoma, extranodal marginal zone B-cell lymphoma, nodal marginal zone B-cell lymphoma, splenic marginal zone B-cell lymphoma, Burkitt lymphoma, lymphoplasmacytic lymphoma, hairy cell leukemia, or primary central nervous system (CNS) lymphoma. In certain other embodiments, the non-Hodgkin's lymphoma is a T-cell lymphoma, such as a precursor T-lymphoblastic lymphoma, peripheral T-cell lymphoma, cutaneous T-cell lymphoma, angioimmunoblastic T-cell lymphoma, extranodal natural killer/T-cell lymphoma, enteropathy type T-cell lymphoma, subcutaneous panniculitis-like T-cell lymphoma, anaplastic large cell lymphoma, or peripheral T-cell lymphoma.

### EXAMPLES

[0382] Below are examples of specific embodiments for carrying out what is disclosed herein. The examples are offered for illustrative purposes only and are not intended to limit scope.

[0383] The practice of the present disclosure will employ, unless otherwise indicated, conventional methods of protein chemistry, biochemistry, recombinant DNA techniques and pharmacology, within the skill of the art. Such techniques are explained fully in the literature. See, e.g., T. E. Creighton, PROTEINS: STRUCTURES AND MOLECULAR PROPERTIES (W.H. Freeman and Company, 1993); A. L. Lehninger, BIOCHEMISTRY (Worth Publishers, Inc., current addition); Sambrook, et al. MOLECULAR CLONING: A LABORATORY MANUAL (2nd Edition, 1989); METHODS IN ENZYMOLOGY (S. Colowick and N. Kaplan eds., Academic Press, Inc.); REMINGTON'S PHARMACEUTICAL SCIENCES, 18th Edition (Easton, Pennsylvania: Mack Publishing Company, 1990); Carey and Sundberg ADVANCED ORGANIC CHEMISTRY 3^{rd} Ed. (Plenum Press) Vols A and B (1992).

[0384] Unless otherwise stated, all reagents and chemicals were obtained from commercial sources and used without further purification.

### Example 1—Recombinant Expression of MHC Class I Multimers

[0385] This example describes the expression, purification, and analysis of exemplary single-chain pMHC-IgM/J-chain Class I multimers.

[0386] To produce single chain-pMHC-IgM/J-chain complex loaded with ELA peptide (ELA-A2-IgM/J-chain complex) DNA constructs encoding: 1) the MHC Class I binding peptide ELAGIGILTV (SEQ ID NO:20), a flexible linker, β2m, a flexible linker, HLA-A2 (Y84A) soluble domain (SEQ ID NO: 276), a flexible linker, and IgM Cμ2, Cμ3, Cμ4 and the tailpiece regions and 2) J-chain were produced and cloned into expression plasmids. Other exemplary single-chain sequences comprising a substitution corresponding to Y84A are set forth in SEQ ID NOs.: 1-12, 199-204, 235-237, 243, 248-249, 259-260. An exemplary schematic of the constructs is shown in FIG. 5A. A first plasmid encoding a single chain-pMHC-IgM (ELA-A2-IgM, SEQ ID NO: 5, 88.2 kDa) and a second plasmid encoding the J-chain with Flag-tag and His-tag (SEQ ID NO: 251, 18.3 kDa) were transiently transfected into Expi293F cells using Expifectamine (ThermoFisher) for expression and secretion of the ELA-A2-IgM multimer. Cells were cultured for 5 days and harvested by centrifugation to separate the supernatant from the cells. Samples from the cell supernatant were subjected to SDS-PAGE and further analyzed by western blotting. The samples were split and analyzed under non-reducing/non-boiled conditions with NuPAGE™ Tris-Acetate 3-8% Gels (ThermoFisher) at 4° C. and reduced/boiled conditions with Bolt 4-12% Bis-Tris Plus Gels at room temperature. After the SDS-PAGE separation, western blots were probed with Dylight800-labeled anti-human IgM (ThermoFisher) and Dylight680-labeled anti-Flag (ThermoFisher) to assess expression levels (FIG. 12A for ELA-A2-IgM).

[0387] Both anti-IgM and anti-Flag antibodies detected a high molecular weight band in the samples from the non-reducing/non-boiling conditions (migrating higher than the highest molecular weight marker at 260 kDa) indicating co-migration of pMHC-IgM and J-chain-Flag and formation of an intact multimeric complex of pMHC-IgM/J-chain.

[0388] The pMHC-IgM/J-chain complex was purified by immobilized metal affinity chromatography (IMAC) using Nickel Sepharose excel resin (Ni Excel, Cytiva) utilizing the His-tag on the J-chain. The Ni Excel resin was pre-equilibrated in binding buffer (23 mM sodium phosphate, 500 mM NaCl, pH 7.4). Supernatant containing protein of interest was incubated with resin overnight and gravity flow purification was performed the next day. The Ni Excel resin was washed with wash buffer (23 mM sodium phosphate, 500 mM NaCl, 20 mM imidazole, pH 7.4) to remove unbound protein contaminants. Protein of interest was eluted using a gradient of 100 mM-500 mM imidazole in 23 mM sodium phosphate, 500 mM NaCl, pH 7.4. IMAC elution fractions were analyzed by western blot and fractions corresponding to intact complex of pMHC-IgM/J-chain were identified. IMAC elution fractions were pooled based on total amount and purity of pMHC-IgM/J-chain complex determined by western blot and concentrated using ultrafiltration (FIG. 12B). The concentrated pMHC-IgM/J-chain complex was loaded onto a Superdex 200 pg size exclusion chromatography (SEC) column pre-equilibrated with SEC buffer (20 mM HEPES, 150 mM NaCl, pH 7.2) for further purification (FIG. 12C). Elution fractions from the SEC were pooled based on total amount and purity of pMHC-IgM/J-chain complex determined by western blot and concentrated using ultrafiltration. To determine the protein concentration samples were measured by absorbance at 280 nm and the concentration calculated using the protein extinction coefficient.

[0389] Analytical size exclusion chromatography was performed to assess homogeneity and size using an AdvanceBio SEC 300 column, 4.6×50 mm, 2.7 μm (Agilent). FIG. 13A shows the analytical SEC for ELA-A2-IgM. The chromatogram shows a single, uniform peak indicative of a homogeneous sample. The purified pMHC-IgM/J-chain complex was characterized by SDS-PAGE stained with Coomassie (InstantBlue, Sigma-Aldrich) and western blot under non-reducing and reducing conditions. Analysis of the non-reduced/unboiled Coomassie-stained sample on the SDS-PAGE showed a single band at high molecular weight indicating an intact, pure ELA-A2-IgM/J-chain complex and western blot showed co-migrating bands with anti-IgM and anti-Flag blots indicating the formation of an intact complex of pMHC-IgM/J-chain (FIG. 13B). Analysis of the reduced/boiled Coomassie-stained sample showed an intense band at approximately 105 kDa corresponding to ELA-A2-IgM and a band at approximately 28 kDa corresponding to J-chain. The calculated molecular weights for ELA-A2-IgM and J-chain are 88.2 kDa and 18.3 kDa, respectively. Size differences on the SDS-PAGE from observed and calculated molecular weight are believed to result from the presence of glycosylation on both proteins. Western blots of reduced/boiled samples were probed with anti-IgM and anti-Flag antibodies and showed bands at approximately 105 kDa, corresponding to the ELA-A2-IgM and approximately 28 kDa corresponding to the J-chain (FIG. 13C).

[0390] Additional pMHC-IgM/J-chain complexes were cloned, expressed, and purified as described above. Details for additional complexes are shown in Table 3.

TABLE 3

| | | Pep- | | |
|---|---|---|---|---|
| | | tide | pMHC- | J |
| pMHC- | | SEQ | IgM | Chain |
| IgM | Peptide | ID | SEQ | SEQ |
| complex | Sequence | NO: | ID NO: | ID NO: |
| NLV-A2- | NLVPMVATV | 19 | SEQ ID | SEQ ID |
| pMHC-IgM | | | NO: 1 | NO: 251 |
| ELA-A2- | ELAGIGILTV | 20 | SEQ ID | SEQ ID |
| pMHC-IgM | | | NO: 5 | NO: 251 |
| ALW-A2- | ALWEIQQVV* | 257 | SEQ ID | SEQ ID |
| pMHC-IgM | | | NO: 235 | NO: 251 |
| KLW-A2- | KLWAQCVQL* | 258 | SEQ ID | SEQ ID |
| pMHC-IgM | | | NO: 236 | NO: 251 |
| YML-A2- | YMLDLQPETT | 160 | SEQ ID | SEQ ID |
| pMHC-IgM | | | NO: 237 | NO: 251 |

*Francis et al. (2022) SCI. IMMUNOL.

[0391] Additional pMHC-IgM/J-chain multimers comprising linker variants were cloned, expressed, and purified. 9-mer 1-pMHC-IgM (9-mer 1), 9-mer 3-pMHC-IgM (9-mer 3), 9-mer 4-pMHC-IgM (9-mer 4), and 9-mer 5-pMHC-IgM (9-mer 5), differed in the amino acid sequence of the 9-mer peptide, but had a common linker-b2m-linker-HLA-A2-linker-IgM sequence (SEQ ID NO: 259) and J-chain (SEQ ID NO: 251). 9-mer 2-pMHC-IgM (9-mer 2) had linker-b2m-linker-HLA-A2-IgM sequence (SEQ ID NO: 260) and J-chain (SEQ ID NO: 251).

[0392] Expression levels and purification yields of pMHC-IgM complexes varied depending on the bound peptide with respect to HLA-A*02:01. Final purification yields ranged between 0.4-40 mg of protein to expression below the limit of detection depending on the N-terminal peptide as shown in Table 4.

TABLE 4
pMHC-IgM production yields based on loading peptide.

| pMHC-IgM complex | Yield (mg/L of culture) |
|---|---|
| NLV-A2-pMHC-IgM | 0.498 |
| ELA-A2-pMHC-IgM | 1.495 |
| ALW-A2-pMHC-IgM* | 23.5 |
| KLW-A2-pMHC-IgM* | 28.5 |
| YML-A2-pMHC-IgM | 9.09 |
| 9-mer 1-pMHC-IgM | 2.82 |
| 9-mer 2-pMHC-IgM | 39 |
| 9-mer 3-pMHC-IgM | 7.35 |
| 9-mer 4-pMHC-IgM | BLOD |
| 9-mer 5-pMHC-IgM | BLOD |

BLOD = below limit of detection

### Example 2—Binding of MHC Class I Multimers to T Cells

[0393] This example describes the binding of pMHC-IgM complexes to T cells as measured by flow cytometry.

[0394] Flow cytometry was used to test binding of pMHC-IgM/J-chain complexes to T cells. An ELA-A2-pMHC-IgM/J-chain multimer complex containing a Flag tag at the J-chain C-terminus was produced essentially as described in Example 1. Anti-MART1 donor T cells specific for ELAGIGILTV (SEQ ID NO: 20)/HLA-A2 (Cellero, Northridge, CA) or non-cognate peptide NLVPMIATV (SEQ ID NO: 233)-expanded donor T cells were incubated with varying concentrations of ELA-A2-IgM/J-chain (12 nM, 4 nM, 1.3 nM, 0.4 nM, 0.15 nM, and 0.05 nM). Bound ELA-A2-IgM/J-chain was detected with PE-labeled anti-Flag antibody (FIG. 14A). ELA-A2-IgM/J-chain showed specific binding to cognate peptide-expanded T cells at all concentrations tested, and only minimal apparent binding to non-cognate-expanded T cells at the highest concentration. Exemplary binding of ELA-A2-pMHC-IgM/J-chain to T cells is shown in Table 5.

TABLE 5

| | percent | | | |
|---|---|---|---|---|
| ELA-A2-pMHC- | positive anti- | | percent positive | |
| IgM/J-chain | Flag | MFI anti-Flag | anti-Flag | MFI anti-Flag |
| concentration | ELAGIGILTV- | ELAGIGILTV- | NLVPMIATV- | NLVPMIATV- |
| (nM) | T cells | T cells | T cells | T cells |
| 12 | 97.7 | 62402 | 3.99 | 1371 |
| 4 | 99 | 51941 | 1.33 | 1107 |
| 1.3 | 86 | 18288 | 0.37 | 903 |
| 0.4 | 96.3 | 13649 | 0.14 | 801 |
| 0.15 | 31 | 3056 | 0.12 | 743 |
| 0.05 | 3.48 | 1682 | 0.084 | 743 |

[0395] ELA-A2-pMHC-IgM/J-chain complex was also tested for binding to J76-CD8 cell line expressing recombinant ELAGIGILTV-HLA-A2 specific TCR by flow cytometry at varying concentrations of pMHC-IgM/J-chain. J76-CD8-NFAT-GFP cells are a Jurkat subline that is devoid of endogenous TCR α and TCR β chains, thereby circumventing the problem of TCR mis-pairing and unexpected specificities.

[0396] ELA-A2-pMHC-IgM, 9-mer 2-HLA-A2-IgM, IgM-Fc, and ELA/HLA-A2-SA were tested for binding to ELAGIGILTV-HLA-A2 TCR on J76-CD8 cells at several concentrations as shown in Table 6.

[0397] Exemplary flow cytometry plots for ELA-A2-pMHC-IgM, 9-mer 2-HLA-A2-IgM, IgM-Fc, and ELA/HLA-A2-SA at 6 nM concentration for binding to ELAGIGILTV-HLA-A2 TCR on J76-CD8 cells are shown in FIG. 14B. A graph of ELA-A2-pMHC-IgM, 9-mer 2-HLA-A2-IgM, IgM-Fc, and ELA/HLA-A2-SA binding to ELAGIGILTV-HLA-A2 TCR on J76-CD8 cells at several concentrations is shown in FIG. 15. ELA-A2-IgM/J-chain showed specific binding to its corresponding cognate ELAGIGILTV-HLA-A2 TCR on J76-CD8 cells at all concentrations tested, whereas no binding was detected with negative controls IgM-Fc or non-cognate 9-mer 2-HLA-A2-IgM/J-chain at and below 30 nM of ELA-A2-pMHC-IgM/J-chain (FIG. 15). ELA-A2-pMHC-IgM/J-chain showed increased binding to cognate TCR compared to ELAGIGILTV-peptide exchanged HLA-A2-streptavidin tetramer (ELA/HLA-A2-SA).

[0398] Exemplary binding of ELA-A2-pMHC-IgM/J-chain to T cells is shown in Table 6 using Mean Fluorescent Intensity at various concentrations of multimer components.

TABLE 6

| | | | | 9-mer 2-HLA- | | ELA/HLA-A2- | | ELA-A2-pMHC- | |
|---|---|---|---|---|---|---|---|---|---|
| | | | | A2-IgM | | SA | | IgM | |
| Protein | | IgM Fc | | % | | % | | % | |
| Concentration | | % positive | MFI | positive | MFI | positive | MFI | positive | MFI |
| 150 | nM | 1.94 | 4936 | 3.66 | 5899 | 77.2 | 30531 | 87.5 | 38247 |
| 30 | nM | 0.27 | 794 | 0.2 | 1048 | 41.4 | 9438 | 79.7 | 26545 |
| 6 | nM | 0.13 | 714 | 0.076 | 823 | 6.45 | 2326 | 75 | 20442 |
| 1.2 | nM | 0.14 | 765 | 0.17 | 743 | 0.61 | 1099 | 51.2 | 12999 |
| 0.24 | nM | 0.13 | 779 | 0.19 | 714 | 0.17 | 845 | 2.5 | 4377 |

### Example 3—Recombinant Expression of MHC Class II Multimers

[0399] This example describes the expression, purification, and analysis of exemplary pMHC-IgM/J-chain Class II multimers.

[0400] To produce single chain-pMHC-IgM/J-chain complex loaded with MTB peptide MTB-DR15-FosW/cJun-IgM(Cμ2-4) complex) DNA constructs encoding: 1) the MHC Class II binding peptide (SEQ ID NO: 234), a flexible linker, MHC Class II β chain, Fos heterodimerization motif (Mason et al. (2006) PROC. NATL. ACAD. SCI. USA, 103:8989-94), and IgM Cμ2, Cμ3, Cμ4, and the tailpiece regions, 2) MHC Class II α chain and Jun heterodimerization motif (Mason et al. (2006) PROC. NATL. ACAD. SCI. USA, 103:8989-94), and 3) J-chain were produced and cloned into three separate expression vectors. The Class II pMHC-IgM multimer MTB-DR15-FosW/cJun-IgM(Cu2-4) was expressed by transiently transfecting ExpiCHO cells with three expression constructs. The first expression construct encoded the MTB peptide-Linker-DRB1*15:01-Linker-FosW-Linker-IgM(Cμ2-4), SEQ ID NO: 207. The MTB peptide comprises residues 1-15 of ESAT-6-like protein EsxO from Mycobacterium tuberculosis (UniProt P9WNI7; SEQ ID NO: 234, MTINYQFGDVDAHGA). The second expression construct encoded DRA1*01-Linker-cJun-Myc, SEQ ID NO: 205. The third expression construct encoded the J-chain with C-terminal Flag and His tags, SEQ ID NO: 251.

[0401] Transfection cultures were harvested 11 days after transfection, and expression of the pMHC-IgM was verified by western blot, shown in FIG. 16A. Samples from supernatant were separated by SDS-PAGE and analyzed by western blotting. Samples were analyzed under non-reducing/non-boiled conditions with NuPAGE™ Tris-Acetate 3-8% Gels (ThermoFisher) at 4° C. After SDS-PAGE separation, a western blot was probed with Dylight800-labeled anti-human IgM (ThermoFisher) antibody, Dylight680-labeled anti-Flag (ThermoFisher) antibody, rabbit polyclonal anti-Myc antibody, and goat anti-rabbit secondary antibody to assess expression levels. The anti-Myc antibody was used to detect the α chain, the anti-IgM antibody was used to detect the peptide-β chain-IgM, and the anti-Flag antibody was used to detect the J chain. A Western blot performed under non-reducing/non-boiled conditions detected a band at very high molecular weight (migrating higher than the highest molecular weight marker at 260 kDa). The anti-IgM, anti-Flag and anti-Myc antibodies detected a band in the same position on the blot, indicating co-migration of pMHC-β-IgM, MHC-α, and J-chain-Flag, and therefore, the formation of an intact complex of Class II pMHC-IgM/J-chain. The transfection cultures were centrifuged to pellet cells and the pMHC-IgM-containing supernatant was filtered before performing batch binding and gravity purification using Ni Excel resin according to the manufacturer's instructions. The Ni Excel resin was equilibrated in binding buffer (23 mM sodium phosphate, 500 mM NaCl, pH 7.4). The wash buffer used for gravity purification was 20 mM imidazole, 23 mM sodium phosphate, 500 mM NaCl, pH 7.4 and the elution buffer used was 500 mM imidazole, 23 mM sodium phosphate, 500 mM NaCl, pH 7.4. The presence of the pMHC-IgM in elution fractions was determined by western blot, shown in FIG. 16B. Elution fractions containing pMHC-IgM were pooled and concentrated before loading onto a Superdex 200 column for size exclusion chromatography to further purify the pMHC-IgM. The SEC buffer used was 20 mM HEPES, 150 mM NaCl, pH 7.2. Western blots were used to determine the presence of the α chain, peptide-β chain-IgM and J chains in the pMHC-IgM in the SEC fractions collected by size exclusion chromatography, shown in FIG. 16C. Western blot of a non-reduced sample shows co-migrating bands with anti-IgM, anti-Myc, and anti-Flag blots confirming the formation of an intact complex of pMHC-Class II-IgM/J-chain.

### Example 4—Modification of MHC Class I Alpha (a) Chain to Enhance Stability

[0402] This example describes the introduction of cysteines into the MHC Class I α chain to create stability enhancing cysteine traps.

[0403] Cys-traps (Disulfide traps) have been reported to increase the expression levels of single-chain pMHC (Truscott, et al. (2007) J. IMMUNOL., 178: 6280-6289) (see, e.g., FIGS. 17A and 17B). To increase stability and expression due to the possible formation of a disulfide bonds, a pair of cysteines was introduced into the pMHC-IgM at the second G position (e.g., GGGGS to GCGGS) in the first G₄S portion of the (G₄S linker between the peptide and β2m and at position Y84 (Y84C) in the HLA chain. Constructs with the peptides 9-mer 2, 9-mer 4, and 9-mer 5, as described in Example 1, were produced as cys-9-mer 2-pMHC-IgM (cys-9-mer 2), cys-9-mer 4-pMHC-IgM (cys-9-mer 4), and cys-9-mer 5-pMHC-IgM (cys 9-mer 5).

[0404] Proteins were expressed essentially as described in Example 1. After expression, the supernatant was recovered and analyzed by western blotting with anti-IgM and anti-Flag antibodies to assess relative expression levels of the Cys-trap pMHC-IgM compared to the unaltered pMHC-IgM construct. FIG. 17C shows western blots loaded with purified cys-9-mer 2-pMHC-IgM, cys-9-mer 4-pMHC-IgM, cys-9-mer 5-pMHC-IgM and control 9-mer 2-pMHC-IgM, 9-mer 4-pMHC-IgM, 9-mer 5-pMHC-IgM and probed with anti-IgM antibody (left panel) and anti-FLAG tag antibody (right panel). Improvements in expression were observed for cys-trap 9-mer 5-A2-pMHC-IgM and cys-trap 9-mer 4-A2-pMHC-IgM compared to 9-mer 5-A2-pMHC-IgM and 9-mer 4-A2-pMHC-IgM.

### Example 5—Preparation of J Chain Effector/Targeting Moiety Constructs

[0405] This example describes expression, purification, and analysis of pMHC-IgM/J-chain fusions with different effector/targeting moieties.

[0406] Expression, production, and characterization of pMHC-IgM with anti-CD3 and PD-L1 effector/targeting moieties was demonstrated using a peptide derived from Orf1ab of SARS-CoV2 fused to HLA-A2 and IgM: KLWAQCVQL (SEQ ID NO:265). Plasmids encoding KLWAQCVQL-HLA-A2-pMHC-IgM, referred to as KLW-A2-pMHC-IgM (SEQ ID NO: 236), and anti-CD3-scFv-J-chain-Flag-His (SEQ ID NO: 254) or PD-L1-ECD-J-chain-Flag-His (SEQ ID NO: 245) or J-chain-Flag-His (SEQ ID NO: 251) were used for transfection of mammalian cells. Constructs were expressed, purified, and analyzed essentially as described in Example 1.

[0407] A western blot performed under non-reducing/non-boiling sample conditions detected a band at very high molecular weight (migrating higher than the highest molecular weight marker at 260 kDa) for all three proteins. FIG. 18A shows a western blot of non-reduced samples probed with anti-IgM antibody (left panel) and anti-FLAG tag antibody (right panel) (Lanes 1: J chain, 2: OKT3-J chain (anti-CD3), 3: PD-L1-ECD-J chain). For all three proteins, the anti-IgM and anti-Flag antibodies detected a band in the same position on the blot, indicating co-migration of pMHC-IgM and Flag-containing species and the formation of an intact complex of KLW-A2-pMHC-IgM/anti-CD3-J-chain, KLW-A2-pMHC-IgM/PD-L1-ECD-J-chain, and KLW-A2-pMHC-IgM/J-chain. A western blot performed under reducing conditions confirmed the identity and size of the individual chains. FIG. 18B shows a western blot of reduced samples probed with anti-IgM antibody (left panel) and anti-FLAG tag antibody (right panel) (Lanes 1: J chain, 2: OKT3-J chain (anti-CD3), 3: PD-L1-ECD-J chain). For each of the three proteins, the reduced/boiled samples on the western blot (FIG. 18B) and Coomassie-stained SDS-PAGE gel (FIG. 18C) show a band at approximately 105 kDa corresponding to KLW-A2-pMHC-IgM. The calculated molecular weight of KLW-A2-pMHC-IgM is 86.2 kDa and the difference in SDS-PAGE-observed and calculated molecular weight is believed to result from glycosylation. As observed in Example 1, the reduced sample of KLW-A2-pMHC-IgM/J-chain also has a band migrating at approximately 28 kDa in the SDS-PAGE. The reduced SDS-PAGE analysis of KLW-A2-pMHC-IgM/anti-CD3-J-chain shows a band migrating at approximately 58 kDa, which differs from the calculated molecular weight (45.1 kDa), and the difference is believed to result from glycosylation. The reduced SDS-PAGE analysis of KLW-A2-pMHC-IgM/PD-L1-ECD-J-chain also shows a band migrating at approximately 70 kDa, which differs from the calculated molecular weight (45.1 kDa), and the difference is likely due to glycosylation. PD-L1-ECD-J-chain has 5 predicted N-linked glycosylation sites whereas anti-CD3-J-chain and J-chain have only 1 predicted N-linked glycosylation site.

[0408] FIG. 18C shows non-reduced (left panel) and reduced (right panel) samples on SDS-PAGE (in both left and right panels, lane 1 corresponds to J-chain, lane 2 corresponds to anti-CD3, and lane 3 corresponds to PD-L1). The final material has a high purity determined by western blot and SDS-PAGE analysis. The yield of final protein varied based on the effector moieties from 16 to 28 mg/L culture (FIG. 18D). These results demonstrate generation of pure, homogeneous pMHC-IgM molecules with different effector-moieties fused to the J-chain.

### Example 6—Sortase Mediated Production of pMHC-IgM

[0409] This example describes pMHC-IgM generation via Sortase-mediated protein-to-protein conjugation.

[0410] ELA/HLA-A2 monomer with a C-terminal Sortase recognition motif (LPETGG SEQ ID NO: 192) and C-terminal Flag and His-tag encoded by the sequence (SEQ ID NO: 243) was transiently expressed in Expi293F cells and purified by IMAC essentially as described in Example 1. IgM-Cμ2-4 Fc/J-chain with an N-terminal GGG Sortase conjugation motif (GGG-IgM) consisting of protein chains GGG-IgM Fc and J-chain (SEQ ID NO: 244 and 251, respectively) was transiently expressed in Expi293F cells and purified by IMAC essentially as described in Example 1. Purified single-chain ELA/HLA-A2 monomer and purified GGG-IgM/J-chain were mixed with Sortase and calcium chloride and incubated for 1 hour at 4° C. (Reaction 1). A second reaction condition was at room temperature with excess sortase (Reaction 2). Exemplary Sortase-mediated protein-to-protein conjugations are shown in FIGS. 19A and 19B. After incubation, the reaction sample was loaded onto a Superdex 200 Increase 10/300 size exclusion chromatography column. Elution fractions associated with high valency ELA-IgM multimers were pooled and concentrated using Amicon 100 kDa MWCO to at least 1 mg/mL and filtered with a 0.22 μm spin filter.

[0411] The valency and purity of sortase-mediated ELA-IgM multimers (Srt-ELA-IgM) were determined by western blot and analytical SEC. FIG. 20A shows western blots probed with anti-IgM antibody (left panel) and anti-HLA antibody (right panel). Lanes 1, 2, and 3 correspond to samples of Srt-ELA-IgM from Reaction 1; lanes 4, 5, and 6 correspond to samples of Srt-ELA-IgM from Reaction 2; lanes 7, 8, and 9 correspond to samples of unconjugated GGG-IgM, and lane 10 corresponds to ELA-A2-IgM control. The gel shows a characteristic “ladder” effect for lanes 1, 2, and 3 corresponding to the individual Srt-ELA-IgM Cμ2-4 Fc chains that were coupled to the individual ELA/HLA-A2 monomers, thus representing a mixed valency of 1, 2, 3, 4, 5, 6, 7, 8, 9, or 10 for HLA. Samples of Reaction 2 show lower HLA valency, and the GGG-IgM control shows zero valency for HLA. The recombinantly produced single-chain pMHC ELA-A2-IgM corresponds to a valency of 10 for HLA. The corresponding size exclusion chromatogram shows that the retention time of Srt-ELA-IgM (Reaction 1) corresponds to a high valency when compared to the control proteins ELA-A2-IgM and GGG-IgM-Fc which have a valency of 10 and 0 HLA's, respectively (FIG. 20B). The product of Reaction 2 showed a lower valency of HLA's indicating Srt-ELA-IgM reacted efficiently and was of high valency.

[0412] Srt-ELA-IgM binding of JurkatJ76-CD8-NFAT-GFP cells expressing recombinant ELAGIGILTV-HLA-A2 specific TCR by flow cytometry was tested as described in Example 2. Binding was tested at 5 different concentrations of IgM: 150 nM, 30 nM, 6 nM, 1.2 nM, and 0.24 nM. Srt-ELA-IgM showed specific binding to its cognate TCR on Jurkat cells (FIG. 21), with 74.5% cells positive at 150 nM Srt-ELA-IgM concentration, whereas no binding was detected with negative control GGG-IgM-Fc (3.22% positive cells). Srt-ELA-IgM showed comparable binding to cognate TCR with recombinantly produced ELA-A2-IgM (ELA-IgM) (82.5% positive cells). Sc-ELA-SA-tetramer showed 19.3% positive cells.

### Example 7—Inhibition of Effector T Cells In Vitro by pMHC-Ig Multimers Coupled to an Immunosuppressive Agent

[0413] This example describes the inhibition of effector T cells by pMHC-Ig multimers coupled to an effector/targeting moiety that acts as an immunosuppressive agent.

[0414] pMHC-Igs coupled to one or more of TGF-b, IL-10, HLA-G, an LILRB1 or LILRB2 agonist, or an exhaustion-inducing agent like PD-L1 or a PD1 agonist are assessed for their ability to reduce TCR signaling, proliferation, cytokine secretion, or cell killing by antigen-specific effector T cells, as shown in the schematic in FIG. 7.

[0415] To assess TCR signaling inhibition, J76-CD8-NFAT-GFP cell lines expressing recombinant TCRs specific to the peptide-MHC (or T cells expanded from PBMCs with cognate peptide) are incubated with an allele-matched APC cell line loaded with the cognate peptide, plus or minus the pMHC-Ig-immunosuppressor multimers. Analysis of NFAT-GFP expression over time at 37° C. is expected to show a reduction in Nuclear factor of activated T-cells (NFAT) signaling in the presence of the pMHC-Ig multimers. Antigen-specific T cells co-cultured with allele-matched APC cells loaded with the cognate peptide can also be stained with anti-CD69-APC (Clone FN50) antibodies and analyzed by flow to measure a reduction in the percentage of CD69+ cells in the presence of the peptide-MHC-Ig multimers. Another measure of effects on TCR signaling is to monitor inhibition of phosphorylation of SLP-76, PLCgamma and ZAP-70 by western blot when pMHC-Ig multimers are incubated with antigen-specific T cells co-cultured with APCs loaded with cognate peptide.

[0416] To assess inhibition of T cell proliferation by pMHC-Ig-immunosuppressor multimers, antigen-specific T cells are loaded with a dye like CFSE, then co-cultured with allele-matched APCs loaded with the cognate peptide plus and minus the multimers. Every generation of cells appears as a new, lower mean fluorescent intensity (MFI) peak on a flow cytometry histogram. Reduced proliferation in the presence of the pMHC-Ig multimers is evidenced by a shift to a higher percentage of T cells with high MFI.

[0417] To assess inhibition of cytokine secretion by pMHC-Ig-immunosuppressor multimers, multimers are added to co-cultures of antigen-specific T cells and allele-matched APCs loaded with cognate peptide, and the culture is monitored for IL-2, IFN-γ or TNFα by ELISA/ELISPOT/Mesoscale. A reduction in secretion indicates immunosuppression by the pMHC-Ig multimer.

[0418] Inhibition of T cell cytotoxicity by pMHC-Ig-immunosuppressor multimers is measured by coculturing antigen-specific T cells with target allele-matched APCs loaded with the cognate peptide. By differential labeling of the T cells vs the target APCs, the loss of viability (live/dead stain) and overall reduction of APC cell counts can be monitored by flow. Co-incubation of pMHC-Ig-immunosuppressor multimers inhibits targeted killing of APCs, resulting in higher numbers of live cells.

### INCORPORATION BY REFERENCE

[0419] The entire disclosure of each of the patent and scientific documents referred to herein is incorporated by reference for all purposes.

### EQUIVALENTS

[0420] An invention may be embodied in other specific forms without departing from the spirit or essential characteristics thereof. The foregoing embodiments are therefore to be considered in all respects illustrative rather than limiting on any invention disclosed herein. Scope of an invention is thus indicated by the appended claims rather than by the foregoing description, and all changes that come within the meaning and range of equivalency of the claims are intended to be embraced therein.

SEQUENCE LISTING SUMMARY

| SEQ | |
|---|---|
| ID | |
| NO: | DESCRIPTION |
| 1 | NLVPMVATVGGGGSGGGGSGGGGSIQRTPKIQVYSRHPAENGKSNFLNCYVSGFHPSDIEVDLLKNGE |
| | RIEKVEHSDLSFSKDWSFYLLYYTEFTPTEKDEYACRVNHVTLSQPKIVKWDRDMGGGGSGGGGSGGG |
| | GSGGGGSGSHSMRYFFTSVSRPGRGEPRFIAVGYVDDTQFVRFDSDAASQRMEPRAPWIEQEGPEYWD |
| | GETRKVKAHSQTHRVDLGTLRGAYNQSEAGSHTVQRMYGCDVGSDWRFLRGYHQYAYDGKDYIALKED |
| | LRSWTAADMAAQTTKHKWEAAHVAEQLRAYLEGTCVEWLRRYLENGKETLQRTDAPKTHMTHHAVSDH |
| | EATLRCWALSFYPAEITLTWQRDGEDQTQDTELVETRPAGDGTFQKWAAVVVPSGQEQRYTCHVQHEG |
| | LPKPLTLRWEPSSGGGGSGGGGSGGGGSIAELPPKVSVFVPPRDGFFGNPRKSKLICQATGESPRQIQ |
| | VSWLREGKQVGSGVTTDQVQAEAKESGPTTYKVTSTLTIKESDWLGQSMFTCRVDHRGLTFQQNASSM |
| | CVPDQDTAIRVFAIPPSFASIFLTKSTKLTCLVTDLTTYDSVTISWTRQNGEAVKTHTNISESHPNAT |
| | FSAVGEASICEDDWNSGERFTCTVTHTDLPSPLKQTISRPKGVALHRPDVYLLPPAREQLNLRESATI |
| | TCLVTGFSPADVFVQWMQRGQPLSPEKYVTSAPMPEPQAPGRYFAHSILTVSEEEWNTGETYTCVVAH |
| | EALPNRVTERTVDKSTGKPTLYNVSLVMSDTAGTCY |
| | (NLV_B2M_HLAA2_IgM2-4 amino acid sequence) |
| 2 | AACCTTGTGCCTATGGTCGCCACAGTGGGTGGTGGCGGCTCCGGAGGCGGTGGCTCCGGCGGCGGCGG |
| | CAGTATTCAAAGAACCCCCAAGATCCAGGTTTATTCTCGCCATCCCGCTGAGAACGGTAAATCTAATT |
| | TCCTTAACTGCTACGTTTCAGGCTTCCATCCAAGCGACATCGAAGTAGATCTGCTCAAAAATGGGGAG |
| | AGAATCGAGAAGGTAGAGCACAGTGACCTAAGTTTCAGTAAAGACTGGTCCTTCTACCTGCTCTACTA |
| | CACTGAGTTCACCCCCACAGAGAAGGACGAATATGCATGTCGGGTCAATCACGTCACCTTGTCTCAAC |
| | CTAAGATCGTGAAATGGGATCGGGATATGGGGGGTGGCGGCTCAGGCGGTGGAGGCTCAGGCGGGGGA |
| | GGATCTGGAGGCGGCGGTAGCGGCTCACACTCTATGAGGTATTTTTTTACCTCAGTGAGCAGGCCAGG |
| | CAGAGGTGAACCCAGATTCATTGCAGTTGGTTACGTTGATGATACCCAGTTCGTCCGCTTTGATTCTG |
| | ACGCCGCATCACAGAGGATGGAACCTAGGGCACCTTGGATAGAACAGGAAGGCCCAGAGTATTGGGAT |
| | GGCGAGACTAGAAAAGTGAAGGCTCATAGCCAGACACATCGAGTAGACCTGGGAACTCTCCGTGGAGC |
| | ATATAACCAGTCCGAGGCTGGCTCCCATACAGTGCAGAGGATGTACGGATGCGACGTGGGCAGCGATT |
| | GGCGTTTTCTACGAGGTTACCATCAGTACGCATACGATGGAAAAGACTATATTGCACTCAAGGAGGAC |
| | CTCCGAAGCTGGACCGCAGCTGATATGGCTGCACAGACTACCAAACATAAGTGGGAGGCAGCTCATGT |
| | TGCAGAGCAACTACGGGCATACCTCGAAGGGACTTGTGTGGAGTGGCTGAGAAGGTACCTAGAGAACG |
| | GGAAGGAGACCCTGCAGCGGACAGACGCCCCAAAGACCCATATGACCCACCACGCTGTCAGTGATCAT |
| | GAAGCCACATTGCGCTGCTGGGCACTTAGTTTCTATCCCGCAGAAATCACCTTGACCTGGCAGCGTGA |
| | CGGCGAAGATCAGACCCAGGACACCGAGCTTGTGGAAACAAGACCTGCCGGAGATGGAACCTTCCAGA |
| | AGTGGGCCGCTGTGGTCGTTCCCAGCGGCCAGGAGCAGCGGTATACTTGTCATGTCCAACATGAGGGA |
| | CTGCCAAAACCCCTCACCCTTAGGTGGGAGCCTAGTTCCGGTGGCGGAGGCTCCGGAGGGGGCGGAAG |
| | CGGAGGTGGTGGATCCATCGCAGAACTGCCACCTAAAGTCAGCGTCTTTGTGCCTCCCCGTGATGGCT |
| | TTTTTGGCAACCCCCGGAAGAGTAAACTAATATGCCAGGCCACAGGATTTAGTCCGCGGCAGATTCAG |
| | GTGTCTTGGCTCCGGGAGGGAAAACAGGTCGGAAGTGGAGTGACCACAGACCAAGTGCAGGCCGAGGC |
| | TAAGGAGAGTGGTCCTACAACTTACAAGGTTACAAGTACCTTGACAATTAAAGAGTCCGATTGGCTGG |
| | GACAGAGTATGTTTACATGTAGAGTGGACCACCGTGGTCTCACTTTCCAGCAGAATGCTAGTTCAATG |
| | TGCGTTCCGGATCAGGATACCGCAATTAGAGTGTTCGCCATCCCTCCCTCTTTTGCTTCCATCTTCCT |
| | GACCAAGAGCACCAAGCTTACATGCTTGGTTACCGATCTTACAACCTATGATTCTGTCACTATCTCCT |
| | GGACACGCCAGAACGGGGAGGCCGTGAAGACACATACTAATATCAGCGAGAGCCATCCCAACGCTACA |
| | TTCTCAGCAGTGGGCGAGGCCTCTATCTGCGAAGACGACTGGAATTCAGGGGAACGGTTCACGTGTAC |
| | TGTCACCCATACAGATCTGCCTTCCCCTCTTAAGCAGACCATTTCACGACCGAAAGGGGTGGCTCTTC |
| | ACCGGCCCGACGTGTACCTACTCCCACCTGCCCGTGAACAACTGAATCTGCGCGAGAGCGCTACCATT |
| | ACCTGCCTGGTAACCGGATTTAGTCCTGCAGACGTCTTTGTTCAGTGGATGCAACGCGGCCAGCCCCT |
| | CTCCCCTGAGAAGTATGTGACTAGTGCCCCTATGCCCGAACCCCAGGCTCCTGGCAGATATTTTGCCC |
| | ATAGCATCCTGACAGTATCAGAAGAGGAGTGGAACACTGGTGAAACCTATACTTGCGTGGTGGCACAC |
| | GAGGCTTTGCCGAACCGCGTCACAGAACGAACCGTTGACAAAAGCACAGGTAAGCCCACCCTGTACAA |
| | TGTCAGCCTCGTAATGTCTGATACAGCAGGTACCTGTTAT |
| | (NLV_B2M_HLAA2_gM2-4 nucleotide sequence) |
| 3 | NLVPMVATVGGGGSGGGGSGGGGSIQRTPKIQVYSRHPAENGKSNFLNCYVSGFHPSDIEVDLLKNGE |
| | RIEKVEHSDLSFSKDWSFYLLYYTEFTPTEKDEYACRVNHVTLSQPKIVKWDRDMGGGGSGGGGSGGG |
| | GSGGGGSGSHSMRYFFTSVSRPGRGEPRFIAVGYVDDTQFVRFDSDAASQRMEPRAPWIEQEGPEYWD |
| | GETRKVKAHSQTHRVDLGTLRGAYNQSEAGSHTVQRMYGCDVGSDWRFLRGYHQYAYDGKDYIALKED |
| | LRSWTAADMAAQTTKHKWEAAHVAEQLRAYLEGTCVEWLRRYLENGKETLQRTDAPKTHMTHHAVSDH |
| | EATLRCWALSFYPAEITLTWQRDGEDQTQDTELVETRPAGDGTFQKWAAVVVPSGQEQRYTCHVQHEG |
| | LPKPLTLRWEPSSGGGGSGGGGSGGGGSIRVFAIPPSFASIFLTKSTKLTCLVTDLTTYDSVTISWTR |
| | QNGEAVKTHTNISESHPNATFSAVGEASICEDDWNSGERFTCTVTHTDLPSPLKQTISRPKGVALHRP |
| | DVYLLPPAREQLNLRESATITCLVTGFSPADVFVQWMQRGQPLSPEKYVTSAPMPEPQAPGRYFAHSI |
| | LTVSEEEWNTGETYTCVVAHEALPNRVTERTVDKSTGKPTLYNVSLVMSDTAGTCY |
| | (NLV_B2M_HLAA2_gM3-4 amino acid sequence) |
| 4 | AACCTTGTGCCTATGGTCGCCACAGTGGGTGGTGGCGGCTCCGGAGGCGGTGGCTCCGGCGGCGGCGG |
| | CAGTATTCAAAGAACCCCCAAGATCCAGGTTTATTCTCGCCATCCCGCTGAGAACGGTAAATCTAATT |
| | TCCTTAACTGCTACGTTTCAGGCTTCCATCCAAGCGACATCGAAGTAGATCTGCTCAAAAATGGGGAG |
| | AGAATCGAGAAGGTAGAGCACAGTGACCTAAGTTTCAGTAAAGACTGGTCCTTCTACCTGCTCTACTA |
| | CACTGAGTTCACCCCCACAGAGAAGGACGAATATGCATGTCGGGTCAATCACGTCACCTTGTCTCAAC |
| | CTAAGATCGTGAAATGGGATCGGGATATGGGGGGTGGCGGCTCAGGCGGTGGAGGCTCAGGCGGGGGA |
| | GGATCTGGAGGCGGCGGTAGCGGCTCACACTCTATGAGGTATTTTTTTACCTCAGTGAGCAGGCCAGG |
| | CAGAGGTGAACCCAGATTCATTGCAGTTGGTTACGTTGATGATACCCAGTTCGTCCGCTTTGATTCTG |
| | ACGCCGCATCACAGAGGATGGAACCTAGGGCACCTTGGATAGAACAGGAAGGCCCAGAGTATTGGGAT |
| | GGCGAGACTAGAAAAGTGAAGGCTCATAGCCAGACACATCGAGTAGACCTGGGAACTCTCCGTGGAGC |
| | ATATAACCAGTCCGAGGCTGGCTCCCATACAGTGCAGAGGATGTACGGATGCGACGTGGGCAGCGATT |
| | GGCGTTTTCTACGAGGTTACCATCAGTACGCATACGATGGAAAAGACTATATTGCACTCAAGGAGGAC |
| | CTCCGAAGCTGGACCGCAGCTGATATGGCTGCACAGACTACCAAACATAAGTGGGAGGCAGCTCATGT |
| | TGCAGAGCAACTACGGGCATACCTCGAAGGGACTTGTGTGGAGTGGCTGAGAAGGTACCTAGAGAACG |
| | GGAAGGAGACCCTGCAGCGGACAGACGCCCCAAAGACCCATATGACCCACCACGCTGTCAGTGATCAT |
| | GAAGCCACATTGCGCTGCTGGGCACTTAGTTTCTATCCCGCAGAAATCACCTTGACCTGGCAGCGTGA |
| | CGGCGAAGATCAGACCCAGGACACCGAGCTTGTGGAAACAAGACCTGCCGGAGATGGAACCTTCCAGA |
| | AGTGGGCCGCTGTGGTCGTTCCCAGCGGCCAGGAGCAGCGGTATACTTGTCATGTCCAACATGAGGGA |
| | CTGCCAAAACCCCTCACCCTTAGGTGGGAGCCTAGTTCCGGTGGCGGAGGCTCCGGAGGGGGCGGAAG |
| | CGGAGGTGGTGGATCCATCCGAGTATTCGCTATCCCACCCAGTTTCGCCTCTATCTTCCTTACCAAAT |
| | CTACTAAACTGACATGCTTGGTCACTGATCTAACCACTTACGATTCTGTGACAATTTCCTGGACAAGG |
| | CAGAACGGAGAGGCAGTAAAGACTCATACGAATATTTCAGAATCCCATCCCAACGCCACGTTTTCCGC |
| | CGTTGGCGAGGCCTCCATTTGTGAGGACGATTGGAATAGCGGAGAGCGCTTTACCTGCACAGTGACGC |
| | ATACAGATCTGCCTAGCCCACTCAAGCAGACTATCTCTCGCCCAAAGGGGGTGGCTCTGCATAGGCCT |
| | GACGTATATCTCCTTCCACCCGCTCGAGAGCAGCTGAACTTGAGAGAATCCGCAACTATTACTTGCTT |
| | GGTGACGGGCTTTTCTCCCGCCGATGTCTTCGTGCAGTGGATGCAGCGTGGACAGCCTCTCTCTCCTG |
| | AGAAATACGTAACATCTGCCCCCATGCCCGAGCCTCAGGCTCCTGGTCGTTATTTTGCTCACAGTATC |
| | CTGACCGTCAGCGAAGAGGAATGGAACACTGGAGAGACCTACACCTGTGTCGTGGCTCATGAAGCTCT |
| | GCCTAACAGGGTCACCGAGCGCACCGTGGACAAAAGCACTGGCAAACCGACCCTGTATAACGTGTCAC |
| | TCGTGATGAGCGACACAGCCGGCACTTGCTAT |
| | (NLV_B2M_HLAA2_gM3-4 nucleotide sequence) |
| 5 | ELAGIGILTVGGGGSGGGGSGGGGSIQRTPKIQVYSRHPAENGKSNFLNCYVSGFHPSDIEVDLLKNG |
| | ERIEKVEHSDLSFSKDWSFYLLYYTEFTPTEKDEYACRVNHVTLSQPKIVKWDRDMGGGGSGGGGSGG |
| | GGSGGGGSGSHSMRYFFTSVSRPGRGEPRFIAVGYVDDTQFVRFDSDAASQRMEPRAPWIEQEGPEYW |
| | DGETRKVKAHSQTHRVDLGTLRGAYNQSEAGSHTVQRMYGCDVGSDWRFLRGYHQYAYDGKDYIALKE |
| | DLRSWTAADMAAQTTKHKWEAAHVAEQLRAYLEGTCVEWLRRYLENGKETLQRTDAPKTHMTHHAVSD |
| | HEATLRCWALSFYPAEITLTWQRDGEDQTQDTELVETRPAGDGTFQKWAAVVVPSGQEQRYTCHVQHE |
| | GLPKPLTLRWEPSSGGGGSGGGGSGGGGSIAELPPKVSVFVPPRDGFFGNPRKSKLICQATGESPRQI |
| | QVSWLREGKQVGSGVTTDQVQAEAKESGPTTYKVTSTLTIKESDWLGQSMFTCRVDHRGLTFQQNASS |
| | MCVPDQDTAIRVFAIPPSFASIFLTKSTKLTCLVTDLTTYDSVTISWTRQNGEAVKTHTNISESHPNA |
| | TFSAVGEASICEDDWNSGERFTCTVTHTDLPSPLKQTISRPKGVALHRPDVYLLPPAREQLNLRESAT |
| | ITCLVTGFSPADVFVQWMQRGQPLSPEKYVTSAPMPEPQAPGRYFAHSILTVSEEEWNTGETYTCVVA |
| | HEALPNRVTERTVDKSTGKPTLYNVSLVMSDTAGTCY |
| | (ELA_B2M_HLAA2_gM2-4 amino acid sequence) |
| 6 | ELAGIGILTVGGGGSGGGGSGGGGSIQRTPKIQVYSRHPAENGKSNFLNCYVSGFHPSDIEVDLLKNG |
| | ERIEKVEHSDLSFSKDWSFYLLYYTEFTPTEKDEYACRVNHVTLSQPKIVKWDRDMGGGGSGGGGSGG |
| | GGSGGGGSGSHSMRYFFTSVSRPGRGEPRFIAVGYVDDTQFVRFDSDAASQRMEPRAPWIEQEGPEYW |
| | DGETRKVKAHSQTHRVDLGTLRGAYNQSEAGSHTVQRMYGCDVGSDWRFLRGYHQYAYDGKDYIALKE |
| | DLRSWTAADMAAQTTKHKWEAAHVAEQLRAYLEGTCVEWLRRYLENGKETLQRTDAPKTHMTHHAVSD |
| | HEATLRCWALSFYPAEITLTWQRDGEDQTQDTELVETRPAGDGTFQKWAAVVVPSGQEQRYTCHVQHE |
| | GLPKPLTLRWEPSSGGGGSGGGGSGGGGSIRVFAIPPSFASIFLTKSTKLTCLVTDLTTYDSVTISWT |
| | RQNGEAVKTHTNISESHPNATFSAVGEASICEDDWNSGERFTCTVTHTDLPSPLKQTISRPKGVALHR |
| | PDVYLLPPAREQLNLRESATITCLVTGFSPADVFVQWMQRGQPLSPEKYVTSAPMPEPQAPGRYFAHS |
| | ILTVSEEEWNTGETYTCVVAHEALPNRVTERTVDKSTGKPTLYNVSLVMSDTAGTCY |
| | (ELA_B2M_HLAA2_gM3-4 amino acid sequence) |
| 7 | AACCTTGTGCCTATGGTCGCCACAGTGGGTGGTGGCGGCTCCGGAGGCGGTGGCTCCGGCGGCGGCGG |
| | CAGTATTCAAAGAACCCCCAAGATCCAGGTTTATTCTCGCCATCCCGCTGAGAACGGTAAATCTAATT |
| | TCCTTAACTGCTACGTTTCAGGCTTCCATCCAAGCGACATCGAAGTAGATCTGCTCAAAAATGGGGAG |
| | AGAATCGAGAAGGTAGAGCACAGTGACCTAAGTTTCAGTAAAGACTGGTCCTTCTACCTGCTCTACTA |
| | CACTGAGTTCACCCCCACAGAGAAGGACGAATATGCATGTCGGGTCAATCACGTCACCTTGTCTCAAC |
| | CTAAGATCGTGAAATGGGATCGGGATATGGGGGGTGGCGGCTCAGGCGGTGGAGGCTCAGGCGGGGGA |
| | GGATCTGGAGGCGGCGGTAGCGGCTCACACTCTATGAGGTATTTTTTTACCTCAGTGAGCAGGCCAGG |
| | CAGAGGTGAACCCAGATTCATTGCAGTTGGTTACGTTGATGATACCCAGTTCGTCCGCTTTGATTCTG |
| | ACGCCGCATCACAGAGGATGGAACCTAGGGCACCTTGGATAGAACAGGAAGGCCCAGAGTATTGGGAT |
| | GGCGAGACTAGAAAAGTGAAGGCTCATAGCCAGACACATCGAGTAGACCTGGGAACTCTCCGTGGAGC |
| | ATATAACCAGTCCGAGGCTGGCTCCCATACAGTGCAGAGGATGTACGGATGCGACGTGGGCAGCGATT |
| | GGCGTTTTCTACGAGGTTACCATCAGTACGCATACGATGGAAAAGACTATATTGCACTCAAGGAGGAC |
| | CTCCGAAGCTGGACCGCAGCTGATATGGCTGCACAGACTACCAAACATAAGTGGGAGGCAGCTCATGT |
| | TGCAGAGCAACTACGGGCATACCTCGAAGGGACTTGTGTGGAGTGGCTGAGAAGGTACCTAGAGAACG |
| | GGAAGGAGACCCTGCAGCGGACAGACGCCCCAAAGACCCATATGACCCACCACGCTGTCAGTGATCAT |
| | GAAGCCACATTGCGCTGCTGGGCACTTAGTTTCTATCCCGCAGAAATCACCTTGACCTGGCAGCGTGA |
| | CGGCGAAGATCAGACCCAGGACACCGAGCTTGTGGAAACAAGACCTGCCGGAGATGGAACCTTCCAGA |
| | AGTGGGCCGCTGTGGTCGTTCCCAGCGGCCAGGAGCAGCGGTATACTTGTCATGTCCAACATGAGGGA |
| | CTGCCAAAACCCCTCACCCTTAGGTGGGAGCCTAGTTCCGGTGGCGGAGGCTCCGGAGGGGGCGGAAG |
| | CGGAGGTGGTGGATCCTGCCATCCGAGGCTCAGCCTTCACAGGCCTGCATTGGAAGACCTGCTACTTG |
| | GTTCCGAAGCCAATCTGACCTGTACTCTTACAGGCTTGCGCGACGCTTCTGGGGTCACGTTCACCTGG |
| | ACACCTTCTAGCGGAAAATCAGCCGTACAAGGGCCCCCTGAGAGAGACTTGTGTGGCTGTTATAGTGT |
| | CTCCAGCGTTTTGCCTGGTTGTGCAGAGCCTTGGAATCATGGGAAAACCTTCACTTGCACAGCTGCAT |
| | ATCCCGAGAGTAAGACTCCACTCACGGCAACCCTGAGTAAATCCGGCAACACATTCCGCCCAGAGGTA |
| | CATCTTCTGCCACCCCCTTCTGAAGAATTGGCATTGAACGAACTCGTCACCCTCACCTGTCTGGCTCG |
| | TGGCTTTAGTCCAAAGGACGTACTGGTGCGATGGCTGCAAGGGTCCCAAGAGCTCCCAAGGGAGAAGT |
| | ACCTCACTTGGGCTAGTAGACAGGAACCATCCCAAGGTACGACAACATTCGCCGTCACATCCATCCTG |
| | CGCGTCGCTGCCGAAGACTGGAAGAAGGGAGACACCTTTTCATGCATGGTCGGACATGAGGCACTCCC |
| | ACTGGCTTTCACTCAAAAGACCATTGATAGACTCGCCGGTAAACCAACTCACGTAAACGTGTCCGTCG |
| | TGATGGCAGAGGTGGATGGTACCTGCTAT |
| | (ELA_B2M_HLAA2_gM3-4 nucleotide sequence) |
| 8 | NLVPMVATVGGGGSGGGGSGGGGSIQRTPKIQVYSRHPAENGKSNFLNCYVSGFHPSDIEVDLLKNGE |
| | RIEKVEHSDLSFSKDWSFYLLYYTEFTPTEKDEYACRVNHVTLSQPKIVKWDRDMGGGGSGGGGSGGG |
| | GSGGGGSGSHSMRYFFTSVSRPGRGEPRFIAVGYVDDTQFVRFDSDAASQRMEPRAPWIEQEGPEYWD |
| | GETRKVKAHSQTHRVDLGTLRGAYNQSEAGSHTVQRMYGCDVGSDWRFLRGYHQYAYDGKDYIALKED |
| | LRSWTAADMAAQTTKHKWEAAHVAEQLRAYLEGTCVEWLRRYLENGKETLQRTDAPKTHMTHHAVSDH |
| | EATLRCWALSFYPAEITLTWQRDGEDQTQDTELVETRPAGDGTFQKWAAVVVPSGQEQRYTCHVQHEG |
| | LPKPLTLRWEPSSGGGGSGGGGSGGGGSCHPRLSLHRPALEDLLLGSEANLTCTLTGLRDASGVTFTW |
| | TPSSGKSAVQGPPERDLCGCYSVSSVLPGCAEPWNHGKTFTCTAAYPESKTPLTATLSKSGNTFRPEV |
| | HLLPPPSEELALNELVTLTCLARGFSPKDVLVRWLQGSQELPREKYLTWASRQEPSQGTTTFAVTSIL |
| | RVAAEDWKKGDTFSCMVGHEALPLAFTQKTIDRLAGKPTHVNVSVVMAEVDGTCY |
| | (NLV_B2M_HLAA2_IgA1.1 amino acid sequence) |
| 9 | NLVPMVATVGGGGSGGGGSGGGGSIQRTPKIQVYSRHPAENGKSNFLNCYVSGFHPSDIEVDLLKNGE |
| | RIEKVEHSDLSFSKDWSFYLLYYTEFTPTEKDEYACRVNHVTLSQPKIVKWDRDMGGGGSGGGGSGGG |
| | GSGGGGSGSHSMRYFFTSVSRPGRGEPRFIAVGYVDDTQFVRFDSDAASQRMEPRAPWIEQEGPEYWD |
| | GETRKVKAHSQTHRVDLGTLRGAYNQSEAGSHTVQRMYGCDVGSDWRFLRGYHQYAYDGKDYIALKED |
| | LRSWTAADMAAQTTKHKWEAAHVAEQLRAYLEGTCVEWLRRYLENGKETLQRTDAPKTHMTHHAVSDH |
| | EATLRCWALSFYPAEITLTWQRDGEDQTQDTELVETRPAGDGTFQKWAAVVVPSGQEQRYTCHVQHEG |
| | LPKPLTLRWEPSSGGGGSGGGGSGGGGSCHPRLSLHRPALEDLLLGSEANLTCTLTGLRDASGATFTW |
| | TPSSGKSAVQGPPERDLCGCYSVSSVLPGCAQPWNHGETFTCTAAHPELKTPLTANITKSGNTFRPEV |
| | HLLPPPSEELALNELVTLTCLARGFSPKDVLVRWLQGSQELPREKYLTWASRQEPSQGTTTYAVTSIL |
| | RVAAEDWKKGETFSCMVGHEALPLAFTQKTIDRMAGKPTHINVSVVMAEADGTCY |
| | (NLV_B2M_HLAA2_IgA2m2.1 amino acid sequence) |
| 10 | AACCTTGTGCCTATGGTCGCCACAGTGGGTGGTGGCGGCTCCGGAGGCGGTGGCTCCGGCGGCGGCGG |
| | CAGTATTCAAAGAACCCCCAAGATCCAGGTTTATTCTCGCCATCCCGCTGAGAACGGTAAATCTAATT |
| | TCCTTAACTGCTACGTTTCAGGCTTCCATCCAAGCGACATCGAAGTAGATCTGCTCAAAAATGGGGAG |
| | AGAATCGAGAAGGTAGAGCACAGTGACCTAAGTTTCAGTAAAGACTGGTCCTTCTACCTGCTCTACTA |
| | CACTGAGTTCACCCCCACAGAGAAGGACGAATATGCATGTCGGGTCAATCACGTCACCTTGTCTCAAC |
| | CTAAGATCGTGAAATGGGATCGGGATATGGGGGGTGGCGGCTCAGGCGGTGGAGGCTCAGGCGGGGGA |
| | GGATCTGGAGGCGGCGGTAGCGGCTCACACTCTATGAGGTATTTTTTTACCTCAGTGAGCAGGCCAGG |
| | CAGAGGTGAACCCAGATTCATTGCAGTTGGTTACGTTGATGATACCCAGTTCGTCCGCTTTGATTCTG |
| | ACGCCGCATCACAGAGGATGGAACCTAGGGCACCTTGGATAGAACAGGAAGGCCCAGAGTATTGGGAT |
| | GGCGAGACTAGAAAAGTGAAGGCTCATAGCCAGACACATCGAGTAGACCTGGGAACTCTCCGTGGAGC |
| | ATATAACCAGTCCGAGGCTGGCTCCCATACAGTGCAGAGGATGTACGGATGCGACGTGGGCAGCGATT |
| | GGCGTTTTCTACGAGGTTACCATCAGTACGCATACGATGGAAAAGACTATATTGCACTCAAGGAGGAC |
| | CTCCGAAGCTGGACCGCAGCTGATATGGCTGCACAGACTACCAAACATAAGTGGGAGGCAGCTCATGT |
| | TGCAGAGCAACTACGGGCATACCTCGAAGGGACTTGTGTGGAGTGGCTGAGAAGGTACCTAGAGAACG |
| | GGAAGGAGACCCTGCAGCGGACAGACGCCCCAAAGACCCATATGACCCACCACGCTGTCAGTGATCAT |
| | GAAGCCACATTGCGCTGCTGGGCACTTAGTTTCTATCCCGCAGAAATCACCTTGACCTGGCAGCGTGA |
| | CGGCGAAGATCAGACCCAGGACACCGAGCTTGTGGAAACAAGACCTGCCGGAGATGGAACCTTCCAGA |
| | AGTGGGCCGCTGTGGTCGTTCCCAGCGGCCAGGAGCAGCGGTATACTTGTCATGTCCAACATGAGGGA |
| | CTGCCAAAACCCCTCACCCTTAGGTGGGAGCCTAGTTCCGGTGGCGGAGGCTCCGGAGGGGGCGGAAG |
| | CGGAGGTGGTGGATCCTGTCACCCTCGCCTGTCTCTGCATCGGCCAGCCCTCGAAGATCTACTACTGG |
| | GATCAGAAGCCAATTTGACCTGTACCCTGACCGGCCTGAGAGATGCCAGCGGCGCAACATTTACTTGG |
| | ACCCCATCTTCTGGTAAATCTGCCGTCCAGGGCCCGCCCGAGCGTGACCTCTGTGGCTGTTACAGCGT |
| | GAGCTCTGTCTTGCCGGGATGTGCTCAACCCTGGAATCATGGAGAGACGTTTACCTGCACCGCCGCAC |
| | ACCCAGAACTCAAAACACCCCTGACCGCCAATATCACCAAATCCGGTAACACCTTTCGACCGGAAGTG |
| | CACCTACTGCCACCACCTTCTGAAGAGCTTGCTTTGAATGAACTCGTGACTTTGACATGCCTAGCTAG |
| | GGGTTTCTCCCCTAAAGACGTTCTGGTAAGGTGGCTCCAAGGCAGCCAAGAGCTACCTCGAGAAAAGT |
| | ATCTAACTTGGGCTTCTAGGCAAGAGCCTTCCCAAGGGACAACCACGTATGCTGTGACCTCTATCCTG |
| | CGAGTCGCAGCAGAAGATTGGAAGAAGGGAGAGACATTTTCATGTATGGTCGGTCATGAAGCTCTCCC |
| | CCTTGCATTTACACAAAAGACTATTGATAGAATGGCAGGTAAGCCAACTCACATAAATGTCTCTGTCG |
| | TGATGGCTGAGGCCGACGGAACCTGTTAC |
| | (NLV_B2M_HLAA2_IgA2m2.1 nucleotide sequence) |
| 11 | NLVPMVATVGGGGSGGGGSGGGGSIQRTPKIQVYSRHPAENGKSNFLNCYVSGFHPSDIEVDLLKNGE |
| | RIEKVEHSDLSFSKDWSFYLLYYTEFTPTEKDEYACRVNHVTLSQPKIVKWDRDMGGGGSGGGGSGGG |
| | GSGGGGSGSHSMRYFFTSVSRPGRGEPRFIAVGYVDDTQFVRFDSDAASQRMEPRAPWIEQEGPEYWD |
| | GETRKVKAHSQTHRVDLGTLRGAYNQSEAGSHTVQRMYGCDVGSDWRFLRGYHQYAYDGKDYIALKED |
| | LRSWTAADMAAQTTKHKWEAAHVAEQLRAYLEGTCVEWLRRYLENGKETLQRTDAPKTHMTHHAVSDH |
| | EATLRCWALSFYPAEITLTWQRDGEDQTQDTELVETRPAGDGTFQKWAAVVVPSGQEQRYTCHVQHEG |
| | LPKPLTLRWEPSSPCRVPPPPPCCHPRLSLHRPALEDLLLGSEANLTCTLTGLRDASGATFTWTPSSG |
| | KSAVQGPPERDLCGCYSVSSVLPGCAQPWNHGETFTCTAAHPELKTPLTANITKSGNTFRPEVHLLPP |
| | PSEELALNELVTLTCLARGFSPKDVLVRWLQGSQELPREKYLTWASRQEPSQGTTTYAVTSILRVAAE |
| | DWKKGETFSCMVGHEALPLAFTQKTIDRMAGKPTHINVSVVMAEADGTCY |
| | (NLV_B2M_HLAA2_IgA2m2.2 amino acid sequence) |
| 12 | AACCTTGTGCCTATGGTCGCCACAGTGGGTGGTGGCGGCTCCGGAGGCGGTGGCTCCGGCGGCGGCGG |
| | CAGTATTCAAAGAACCCCCAAGATCCAGGTTTATTCTCGCCATCCCGCTGAGAACGGTAAATCTAATT |
| | TCCTTAACTGCTACGTTTCAGGCTTCCATCCAAGCGACATCGAAGTAGATCTGCTCAAAAATGGGGAG |
| | AGAATCGAGAAGGTAGAGCACAGTGACCTAAGTTTCAGTAAAGACTGGTCCTTCTACCTGCTCTACTA |
| | CACTGAGTTCACCCCCACAGAGAAGGACGAATATGCATGTCGGGTCAATCACGTCACCTTGTCTCAAC |
| | CTAAGATCGTGAAATGGGATCGGGATATGGGGGGTGGCGGCTCAGGCGGTGGAGGCTCAGGCGGGGGA |
| | GGATCTGGAGGCGGCGGTAGCGGCTCACACTCTATGAGGTATTTTTTTACCTCAGTGAGCAGGCCAGG |
| | CAGAGGTGAACCCAGATTCATTGCAGTTGGTTACGTTGATGATACCCAGTTCGTCCGCTTTGATTCTG |
| | ACGCCGCATCACAGAGGATGGAACCTAGGGCACCTTGGATAGAACAGGAAGGCCCAGAGTATTGGGAT |
| | GGCGAGACTAGAAAAGTGAAGGCTCATAGCCAGACACATCGAGTAGACCTGGGAACTCTCCGTGGAGC |
| | ATATAACCAGTCCGAGGCTGGCTCCCATACAGTGCAGAGGATGTACGGATGCGACGTGGGCAGCGATT |
| | GGCGTTTTCTACGAGGTTACCATCAGTACGCATACGATGGAAAAGACTATATTGCACTCAAGGAGGAC |
| | CTCCGAAGCTGGACCGCAGCTGATATGGCTGCACAGACTACCAAACATAAGTGGGAGGCAGCTCATGT |
| | TGCAGAGCAACTACGGGCATACCTCGAAGGGACTTGTGTGGAGTGGCTGAGAAGGTACCTAGAGAACG |
| | GGAAGGAGACCCTGCAGCGGACAGACGCCCCAAAGACCCATATGACCCACCACGCTGTCAGTGATCAT |
| | GAAGCCACATTGCGCTGCTGGGCACTTAGTTTCTATCCCGCAGAAATCACCTTGACCTGGCAGCGTGA |
| | CGGCGAAGATCAGACCCAGGACACCGAGCTTGTGGAAACAAGACCTGCCGGAGATGGAACCTTCCAGA |
| | AGTGGGCCGCTGTGGTCGTTCCCAGCGGCCAGGAGCAGCGGTATACTTGTCATGTCCAACATGAGGGA |
| | CTGCCAAAACCCCTCACCCTTAGGTGGGAGCCTAGTTCCCCATGTCGAGTTCCACCACCACCACCCTG |
| | CTGTCACCCTCGCCTGTCTCTGCATCGGCCAGCCCTCGAAGATCTACTACTGGGATCAGAAGCCAATT |
| | TGACCTGTACCCTGACCGGCCTGAGAGATGCCAGCGGCGCAACATTTACTTGGACCCCATCTTCTGGT |
| | AAATCTGCCGTCCAGGGCCCGCCCGAGCGTGACCTCTGTGGCTGTTACAGCGTGAGCTCTGTCTTGCC |
| | GGGATGTGCTCAACCCTGGAATCATGGAGAGACGTTTACCTGCACCGCCGCACACCCAGAACTCAAAA |
| | CACCCCTGACCGCCAATATCACCAAATCCGGTAACACCTTTCGACCGGAAGTGCACCTACTGCCACCA |
| | CCTTCTGAAGAGCTTGCTTTGAATGAACTCGTGACTTTGACATGCCTAGCTAGGGGTTTCTCCCCTAA |
| | AGACGTTCTGGTAAGGTGGCTCCAAGGCAGCCAAGAGCTACCTCGAGAAAAGTATCTAACTTGGGCTT |
| | CTAGGCAAGAGCCTTCCCAAGGGACAACCACGTATGCTGTGACCTCTATCCTGCGAGTCGCAGCAGAA |
| | GATTGGAAGAAGGGAGAGACATTTTCATGTATGGTCGGTCATGAAGCTCTCCCCCTTGCATTTACACA |
| | AAAGACTATTGATAGAATGGCAGGTAAGCCAACTCACATAAATGTCTCTGTCGTGATGGCTGAGGCCG |
| | ACGGAACCTGTTAC |
| | (NLV_B2M_HLAA2_IgA2m2.2 nucleotide sequence) |
| 13 | IKEEHVIIQAEFYLNPDQSGEFMFDFDGDEIFHVDMAKKETVWRLEEFGRFASFEAQGALANIAVDKA |
| | NLEIMTKRSNYTPITNVPPEVTVLTNSPVELREPNVLICFIDKFTPPVVNVTWLRNGKPVTTGVSETV |
| | FLPRFDHLFRKFHYLPFLPSTEDVYDCRVEHWGLDEPLLKHWEFDAPSPLPETTE |
| | (DRA1*01 soluble) |
| 14 | PKYVKQNTLKLATGGGGSGGGGSGGGGSGDTRPRFLWQLKFECHFFNGTERVRLLERCIYNQEESVRF |
| | DSDVGEYRAVTELGRPDAEYWNSQKDLLEQRRAAVDTYCRHNYGVGESFTVQRRVEPKVTVYPSKTQP |
| | LQHHNLLVCSVSGFYPGSIEVRWFRNGQEEKAGVVSTGLIQNGDWTFQTLVMLETVPRSGEVYTCQVE |
| | HPSVTSPLTVEWRARSESAQSKGGGGSGGGGSGGGGSIAELPPKVSVFVPPRDGFFGNPRKSKLICQA |
| | TGFSPRQIQVSWLREGKQVGSGVTTDQVQAEAKESGPTTYKVTSTLTIKESDWLGQDMFTCRVDHRGL |
| | TFQQNASSMCVPDQDTAIRVFAIPPSFASIFLTKSTKLTCLVTDLTTYDSVTISWTRQNGEAVKTHTN |
| | ISESHPNATFSAVGEASICEDDWNSGERFTCTVTHTDLPSPLKQTISRPKGVALHRPDVYLLPPAREQ |
| | LNLRESATITCLVTGFSPADVFVQWMQRGQPLSPEKYVTSAPMPEPQAPGRYFAHSILTVSEEEWNTG |
| | ETYTCVVAHEALPNRVTERTVDKSTGKPTLYNVSLVMSDTAGTCY |
| | (HA 306-318-Linker-DRB1*01-linker-gM2-4 amino acid sequence) |
| 15 | PKYVKQNTLKLATGGGGGSIEGRGSGGGSGDTRPRFLWQLKFECHFFNGTERVRLLERCIYNQEESVR |
| | FDSDVGEYRAVTELGRPDAEYWNSQKDLLEQRRAAVDTYCRHNYGVGESFTVQRRVEPKVTVYPSKTQ |
| | PLQHHNLLVCSVSGFYPGSIEVRWFRNGQEEKAGVVSTGLIQNGDWTFQTLVMLETVPRSGEVYTCQV |
| | EHPSVTSPLTVEWRARSESAQSKGGGGSGGGGSGGGGSIAELPPKVSVFVPPRDGFFGNPRKSKLICQ |
| | ATGFSPRQIQVSWLREGKQVGSGVTTDQVQAEAKESGPTTYKVTSTLTIKESDWLGQSMFTCRVDHRG |
| | LTFQQNASSMCVPDQDTAIRVFAIPPSFASIFLTKSTKLTCLVTDLTTYDSVTISWTRQNGEAVKTHT |
| | NISESHPNATFSAVGEASICEDDWNSGERFTCTVTHTDLPSPLKQTISRPKGVALHRPDVYLLPPARE |
| | QLNLRESATITCLVTGFSPADVFVQWMQRGQPLSPEKYVTSAPMPEPQAPGRYFAHSILTVSEEEWNT |
| | GETYTCVVAHEALPNRVTERTVDKSTGKPTLYNVSLVMSDTAGTCY |
| | (HA 306-318-LinkerXa-DRB1*01-linker-gM2-4 amino acid sequence) |
| 16 | IKEEHVIIQAEFYLNPDQSGEFMFDFDGDEIFHVDMAKKETVWRLEEFGRFASFEAQGALANIAVDKA |
| | NLEIMTKRSNYTPITNVPPEVTVLTNCPVELREPNVLICFIDKFTPPVVNVTWLRNGKPVTTGVSETV |
| | FLPRFDHLFRKFHYLPFLPSTEDVYDCRVEHWGLDEPLLKHWEFDAPSPLPETTE |
| | (DRA1*01 (S95C) amino acid sequence) |
| 17 | PKYVKQNTLKLATGGGGSGGGGSGGGGSGDTRPRFLWQLKFECHFFNGTERVRLLERCIYNQEESVRF |
| | DSDVGEYRAVTELGRPDAEYWNSQKDLLEQRRAAVDTYCRHNYGVGESFTVQRRVEPKVTVYPSKTQP |
| | LQHHNLLVCSVCGFYPGSIEVRWFRNGQEEKAGVVSTGLIQNGDWTFQTLVMLETVPRSGEVYTCQVE |
| | HPSVTSPLTVEWRARSESAQSKGGGGSGGGGSGGGGSIAELPPKVSVFVPPRDGFFGNPRKSKLICQA |
| | TGFSPRQIQVSWLREGKQVGSGVTTDQVQAEAKESGPTTYKVTSTLTIKESDWLGQDMFTCRVDHRGL |
| | TFQQNASSMCVPDQDTAIRVFAIPPSFASIFLTKSTKLTCLVTDLTTYDSVTISWTRQNGEAVKTHTN |
| | ISESHPNATFSAVGEASICEDDWNSGERFTCTVTHTDLPSPLKQTISRPKGVALHRPDVYLLPPAREQ |
| | LNLRESATITCLVTGFSPADVFVQWMQRGQPLSPEKYVTSAPMPEPQAPGRYFAHSILTVSEEEWNTG |
| | ETYTCVVAHEALPNRVTERTVDKSTGKPTLYNVSLVMSDTAGTCY |
| | (HA 306-318-Linker-DRB1*01 (S120C)-linker-gM2-4 amino acid |
| | sequence) |
| 18 | PVSKMRMATPLLMQAGGGGGSIEGRGSGGGSGDTRPRFLWQLKFECHFFNGTERVRLLERCIYNQEES |
| | VRFDSDVGEYRAVTELGRPDAEYWNSQKDLLEQRRAAVDTYCRHNYGVGESFTVQRRVEPKVTVYPSK |
| | TQPLQHHNLLVCSVSGFYPGSIEVRWFRNGQEEKAGVVSTGLIQNGDWTFQTLVMLETVPRSGEVYTC |
| | QVEHPSVTSPLTVEWRARSESAQSKGGGGSGGGGSGGGGSIAELPPKVSVFVPPRDGFFGNPRKSKLI |
| | CQATGFSPRQIQVSWLREGKQVGSGVTTDQVQAEAKESGPTTYKVTSTLTIKESDWLGQSMFTCRVDH |
| | RGLTFQQNASSMCVPDQDTAIRVFAIPPSFASIFLTKSTKLTCLVTDLTTYDSVTISWTRQNGEAVKT |
| | HTNISESHPNATFSAVGEASICEDDWNSGERFTCTVTHTDLPSPLKQTISRPKGVALHRPDVYLLPPA |
| | REQLNLRESATITCLVTGFSPADVFVQWMQRGQPLSPEKYVTSAPMPEPQAPGRYFAHSILTVSEEEW |
| | NTGETYTCVVAHEALPNRVTERTVDKSTGKPTLYNVSLVMSDTAGTCY |
| | (CLIP-LinkerXa-DRB1*01-linker-gM2-4 amino acid sequence) |
| 19 | NLVPMVATV |
| | (HLA-A*02:01 restricted CMV pp65 epitope) |
| 20 | ELAGIGILTV |
| | (HLA-A*02:01 restricted MART-1 epitope) |
| 21 | PKYVKQNTLKLAT |
| | (HA 306-318 peptide) |
| 22 | PVSKMRMATPLLMQA |
| | (CLIP peptide) |
| 23 | IQRTPKIQVYSRHPAENGKSNFLNCYVSGFHPSDIEVDLLKNGERIEKVEHSDLSFSKDWSFYLLYYT |
| | EFTPTEKDEYACRVNHVTLSQPKIVKWDRDMGGGGSGGGGSGGGGSGGGGSGSHSMRYFFTSVSRPGR |
| | GEPRFIAVGYVDDTQFVRFDSDAASQRMEPRAPWIEQEGPEYWDGETRKVKAHSQTHRVDLGTLRGCY |
| | NQSEAGSHTVQRMYGCDVGSDWRFLRGYHQYAYDGKDYIALKEDLRSWTAADMCAQTTKHKWEAAHVA |
| | EQLRAYLEGTCVEWLRRYLENGKETLQRTDAPKTHMTHHAVSDHEATLRCWALSFYPAEITLTWQRDG |
| | EDQTQDTELVETRPAGDGTFQKWAAVVVPSGQEQRYTCHVQHEGLPKPLTLRWEPSSGGGGSGGGGSG |
| | GGGSIAELPPKVSVFVPPRDGFFGNPRKSKLICQATGFSPRQIQVSWLREGKQVGSGVTTDQVQAEAK |
| | ESGPTTYKVTSTLTIKESDWLGQSMFTCRVDHRGLTFQQNASSMCVPDQDTAIRVFAIPPSFASIFLT |
| | KSTKLTCLVTDLTTYDSVTISWTRQNGEAVKTHTNISESHPNATFSAVGEASICEDDWNSGERFTCTV |
| | THTDLPSPLKQTISRPKGVALHRPDVYLLPPAREQLNLRESATITCLVTGFSPADVFVQWMQRGQPLS |
| | PEKYVTSAPMPEPQAPGRYFAHSILTVSEEEWNTGETYTCVVAHEALPNRVTERTVDKSTGKPTLYNV |
| | SLVMSDTAGTCY |
| | (beta2m-HLA-A2 (Y84C, A139C)-gM2-4 amino acid sequence) |
| 24 | GSHSMRYFFTSVSRPGRGEPRFIAVGYVDDTQFVRFDSDAASQRMEPRAPWIEQEGPEYWDGETRKVK |
| | AHSQTHRVDLGTLRGCYNQSEAGSHTVQRMYGCDVGSDWRFLRGYHQYAYDGKDYIALKEDLRSWTAA |
| | DMCAQTTKHKWEAAHVAEQLRAYLEGTCVEWLRRYLENGKETLQRTDAPKTHMTHHAVSDHEATLRCW |
| | ALSFYPAEITLTWQRDGEDQTQDTELVETRPAGDGTFQKWAAVVVPSGQEQRYTCHVQHEGLPKPLTL |
| | RWEPSSGGGGSGGGGSGGGGSIAELPPKVSVFVPPRDGFFGNPRKSKLICQATGFSPRQIQVSWLREG |
| | KQVGSGVTTDQVQAEAKESGPTTYKVTSTLTIKESDWLGQSMFTCRVDHRGLTFQQNASSMCVPDQDT |
| | AIRVFAIPPSFASIFLTKSTKLTCLVTDLTTYDSVTISWTRQNGEAVKTHTNISESHPNATFSAVGEA |
| | SICEDDWNSGERFTCTVTHTDLPSPLKQTISRPKGVALHRPDVYLLPPAREQLNLRESATITCLVTGF |
| | SPADVFVQWMQRGQPLSPEKYVTSAPMPEPQAPGRYFAHSILTVSEEEWNTGETYTCVVAHEALPNRV |
| | TERTVDKSTGKPTLYNVSLVMSDTAGTCY |
| | (HLA-A2 (Y84C, A139C)-gM2-4 amino acid sequence) |
| 25 | msrsvalavlallslsgleaiqrtpkiqvysrhpaengksnflncyvsgfhpsdievdll |
| | kngeriekvehsdlsfskdwsfyllyyteftptekdeyacrvnhvtlsqpkivkwdrdm |
| | (full length human beta-2-microglobulin) |
| 26 | QEDERIVLVDNKCKCARITSRIIRSSEDPNEDIVERNIRIIVPLNNRENISDPTSPLRTRFVYHLSDL |
| | CKKCDPTEVELDNQIVTATQSNICDEDSATETCYTYDRNKCYTAVVPLVYGGETKMVETALTPDACYP |
| | D |
| | (Full length mature Human Immunoglobulin J chain (without signal |
| | sequence)) |
| 27 | QEDERIVLVDNKCKCARITSRIIRSSEDPNEDIVERNIRIIVPLNNRENISDPTSPLRTRFVYHLSDL |
| | CKKCDPTEVELDNQIVTATQSNICDEDSATETCYTYDRNKCYTAVVPLVYGGETKMVETALTPDACYP |
| | DGGGGSGGGGSGGGGSFTVTVPKDLYVVEYGSNMTIECKFPVEKQLDLAALIVYWEMEDKNIIQFVHG |
| | EEDLKVQHSSYRQRARLLKDQLSLGNAALQITDVKLQDAGVYRCMISYGGADYKRITVKVNA |
| | (Jch-(G4S)3-PDL1D1 amino acid sequence) |
| 28 | QEDERIVLVDNKCKCARITSRIIRSSEDPNEDIVERNIRIIVPLNNRENISDPTSPLRTRFVYHLSDL |
| | CKKCDPTEVELDNQIVTATQSNICDEDSATETCYTYDRNKCYTAVVPLVYGGETKMVETALTPDACYP |
| | DGGGGSGGGGSGGGGSFTVTVPKDLYVVEYGSNMTIECKFPVEKQLDLAALIVYWEMEDKNIIQFVHG |
| | EEDLKVQHSSYRQRARLLKDQLSLGNAALQITDVKLQDAGVYRCMISYGGADYKRITVKVNAPYNKIN |
| | QRILVVDPVTSEHELTCQAEGYPKAEVIWTSSDHQVLSGKTTTTNSKREEKLFNVTSTLRINTTTNEI |
| | FYCTFRRLDPEENHTAELVIPELPLAHPPNER |
| | Jch-(G4S)3-PDL1ECD amino acid sequence) |
| 29 | MAVMAPRTLVLLLSGALALTQTWAGSHSMRYFFTSVSRPGRGEPRFIAVGYVDDTQFVRFDSDAASQR |
| | MEPRAPWIEQEGPEYWDGETRKVKAHSQTHRVDLGTLRGYYNQSEAGSHTVQRMYGCDVGSDWRFLRG |
| | YHQYAYDGKDYIALKEDLRSWTAADMAAQTTKHKWEAAHVAEQLRAYLEGTCVEWLRRYLENGKETLQ |
| | RTDAPKTHMTHHAVSDHEATLRCWALSFYPAEITLTWQRDGEDQTQDTELVETRPAGDGTFQKWAAVV |
| | VPSGQEQRYTCHVQHEGLPKPLTLRWEPSSQPTISIVGIIAGLVLFGAVITGAVVAAVMWRRKSSDRK |
| | GGSYSQAASSDSAQGSDVSLTACKV |
| | (HLA-A*02:01 full-length) |
| 30 | GSHSMRYFFTSVSRPGRGEPRFIAVGYVDDTQFVRFDSDAASQRMEPRAPWIEQEGPEYWDGETRKVK |
| | AHSQTHRVDLGTLRGYYNQSEAGSHTVQRMYGCDVGSDWRFLRGYHQYAYDGKDYIALKEDLRSWTAA |
| | DMAAQTTKHKWEAAHVAEQLRAYLEGTCVEWLRRYLENGKETLQRTDAPKTHMTHHAVSDHEATLRCW |
| | ALSFYPAEITLTWQRDGEDQTQDTELVETRPAGDGTFQKWAAVVVPSGQEQRYTCHVQHEGLPKPLTL |
| | RWEPSS |
| | (HLA-A*02:01; soluble domain residues 25-302) |
| 31 | GSHSMRYFFTSVSRPGRGEPRFIAVGYVDDTQFVRFDSDAASQKMEPRAPWIEQEGPEYWDQETRNMK |
| | AHSQTDRANLGTLRGYYNQSEDGSHTIQIMYGCDVGPDGRFLRGYRQDAYDGKDYIALNEDLRSWTAA |
| | DMAAQITKRKWEAVHAAEQRRVYLEGRCVDGLRRYLENGKETLQRTDPPKTHMTHHPISDHEATLRCW |
| | ALGFYPAEITLTWQRDGEDQTQDTELVETRPAGDGTFQKWAAVVVPSGEEQRYTCHVQHEGLPKPLTL |
| | RWELSS |
| | (HLA-A*01:01 soluble) |
| 32 | GSHSMRYFFTSVSRPGRGEPRFIAVGYVDDTQFVRFDSDAASQRMEPRAPWIEQEGPEYWDQETRNVK |
| | AQSQTDRVDLGTLRGYYNQSEAGSHTIQIMYGCDVGSDGRFLRGYRQDAYDGKDYIALNEDLRSWTAA |
| | DMAAQITKRKWEAAHEAEQLRAYLDGTCVEWLRRYLENGKETLQRTDPPKTHMTHHPISDHEATLRCW |
| | ALGFYPAEITLTWQRDGEDQTQDTELVETRPAGDGTFQKWAAVVVPSGEEQRYTCHVQHEGLPKPLTL |
| | RWELSS |
| | (HLA-A*03:01 soluble) |
| 33 | GSHSMRYFYTSVSRPGRGEPRFIAVGYVDDTQFVRFDSDAASQRMEPRAPWIEQEGPEYWDQETRNVK |
| | AQSQTDRVDLGTLRGYYNQSEDGSHTIQIMYGCDVGPDGRFLRGYRQDAYDGKDYIALNEDLRSWTAA |
| | DMAAQITKRKWEAAHAAEQQRAYLEGRCVEWLRRYLENGKETLQRTDPPKTHMTHHPISDHEATLRCW |
| | ALGFYPAEITLTWQRDGEDQTQDTELVETRPAGDGTFQKWAAVVVPSGEEQRYTCHVQHEGLPKPLTL |
| | RWELSS |
| | (HLA-A*11:01 soluble) |
| 34 | GSHSMRYFSTSVSRPGRGEPRFIAVGYVDDTQFVRFDSDAASQRMEPRAPWIEQEGPEYWDEETGKVK |
| | AHSQTDRENLRIALRYYNQSEAGSHTLQMMFGCDVGSDGRFLRGYHQYAYDGKDYIALKEDLRSWTAA |
| | DMAAQITKRKWEAAHVAEQQRAYLEGTCVDGLRRYLENGKETLQRTDPPKTHMTHHPISDHEATLRCW |
| | ALGFYPAEITLTWQRDGEDQTQDTELVETRPAGDGTFQKWAAVVVPSGEEQRYTCHVQHEGLPKPLTL |
| | RWEPSS |
| | (HLA-A*24:02 soluble) |
| 35 | GSHSMRYFYTSVSRPGRGEPRFISVGYVDDTQFVRFDSDAASPREEPRAPWIEQEGPEYWDRNTQIYK |
| | AQAQTDRESLRNLRGYYNQSEAGSHTLQSMYGCDVGPDGRLLRGHDQYAYDGKDYIALNEDLRSWTAA |
| | DTAAQITQRKWEAAREAEQRRAYLEGECVEWLRRYLENGKDKLERADPPKTHVTHHPISDHEATLRCW |
| | ALGFYPAEITLTWQRDGEDQTQDTELVETRPAGDRTFQKWAAVVVPSGEEQRYTCHVQHEGLPKPLTL |
| | RWEPSS |
| | (HLA-B*07:02 soluble) |
| 36 | GSHSMRYFSTSVSWPGRGEPRFIAVGYVDDTQFVRFDSDAASPRGEPREPWVEQEGPEYWDRETQKYK |
| | RQAQADRVNLRKLRGYYNQSEDGSHTLQRMFGCDLGPDGRLLRGYNQFAYDGKDYIALNEDLRSWTAA |
| | DTAAQITQRKWEAAREAEQRRAYLEGTCVEWLRRYLENGKETLQRAEHPKTHVTHHPVSDHEATLRCW |
| | ALGFYPAEITLTWQWDGEDQTQDTELVETRPAGDGTFQKWAAVVVPSGEEQRYTCHVQHEGLPEPLTL |
| | RWKPSS |
| | (HLA-C*04:01 soluble) |
| 37 | CSHSMRYFDTAVSRPGRGEPRFISVGYVDDTQFVRFDSDAASPRGEPRAPWVEQEGPEYWDRETQKYK |
| | RQAQADRVSLRNLRGYYNQSEDGSHTLQRMSGCDLGPDGRLLRGYDQSAYDGKDYIALNEDLRSWTAA |
| | DTAAQITQRKLEAARAAEQLRAYLEGTCVEWLRRYLENGKETLQRAEPPKTHVTHHPLSDHEATLRCW |
| | ALGFYPAEITLTWQRDGEDQTQDTELVETRPAGDGTFQKWAAVVVPSGQEQRYTCHMQHEGLQEPLTL |
| | SWEPSS |
| | (HLA-C*07:02 soluble) |
| 38 | GSHSMRYFDTAMSRPGRGEPRFISVGYVDDTQFVRFDSDAASPREEPRAPWIEQEGPEYWDRNTQIFK |
| | TNTQTDRESLRNLRGYYNQSEAGSHTLQSMYGCDVGPDGRLLRGHNQYAYDGKDYIALNEDLRSWTAA |
| | DTAAQITQRKWEAARVAEQDRAYLEGTCVEWLRRYLENGKDTLERADPPKTHVTHHPISDHEATLRCW |
| | ALGFYPAEITLTWQRDGEDQTQDTELVETRPAGDRTFQKWAAVVVPSGEEQRYTCHVQHEGLPKPLTL |
| | RWEPSS |
| | (HLA-B*08:01 soluble) |
| 39 | GSHSMRYFYTAMSRPGRGEPRFIAVGYVDDTQFVRFDSDAASPRTEPRAPWIEQEGPEYWDRNTQIFK |
| | TNTQTYRESLRNLRGYYNQSEAGSHIIQRMYGCDLGPDGRLLRGHDQSAYDGKDYIALNEDLSSWTAA |
| | DTAAQITQRKWEAARVAEQLRAYLEGLCVEWLRRYLENGKETLQRADPPKTHVTHHPVSDHEATLRCW |
| | ALGFYPAEITLTWQRDGEDQTQDTELVETRPAGDRTFQKWAAVVVPSGEEQRYTCHVQHEGLPKPLTL |
| | RWEPSS |
| | (HLA-B*35:01 soluble) |
| 40 | GSHSMRYFYTAMSRPGRGEPRFIAVGYVDDTQFVRFDSDAASPRMAPRAPWIEQEGPEYWDGETRNMK |
| | ASAQTYRENLRIALRYYNQSEAGSHIIQVMYGCDVGPDGRLLRGHDQSAYDGKDYIALNEDLSSWTAA |
| | DTAAQITQRKWEAARVAEQLRAYLEGLCVEWLRRYLENGKETLQRADPPKTHVTHHPISDHEATLRCW |
| | ALGFYPAEITLTWQRDGEDQTQDTELVETRPAGDRTFQKWAAVVVPSGEEQRYTCHVQHEGLPKPLTL |
| | RWEPSS |
| | (HLA-B*57:01 soluble) |
| 41 | GSHSMRYFYTAMSRPGRGEPRFIAVGYVDDTQFVRFDSDAASPRMAPRAPWIEQEGPEYWDGETRNMK |
| | ASAQTYRENLRIALRYYNQSEAGSHIIQVMYGCDVGPDGRLLRGHNQYAYDGKDYIALNEDLSSWTAA |
| | DTAAQITQRKWEAARVAEQLRAYLEGLCVEWLRRYLENGKETLQRADPPKTHVTHHPISDHEATLRCW |
| | ALGFYPAEITLTWQRDGEDQTQDTELVETRPAGDRTFQKWAAVVVPSGEEQRYTCHVQHEGLPKPLTL |
| | RWEPSS |
| | (HLA-B*57:03 soluble) |
| 42 | GSHSLKYFHTSVSRPGRGEPRFISVGYVDDTQFVRFDNDAASPRMVPRAPWMEQEGSEYWDRETRSAR |
| | DTAQIFRVNLRTLRGYYNQSEAGSHTLQWMHGCELGPDGRFLRGYEQFAYDGKDYLTLNEDLRSWTAV |
| | DTAAQISEQKSNDASEAEHQRAYLEDTCVEWLHKYLEKGKETLLHLEPPKTHVTHHPISDHEATLRCW |
| | ALGFYPAEITLTWQQDGEGHTQDTELVETRPAGDGTFQKWAAVVVPSGEEQRYTCHVQHEGLPEPVTL |
| | RWKPAS |
| | (HLA-E soluble) |
| 43 | CSHSMRYFYTAVSRPGRGEPRFIAVGYVDDTQFVRFDSDAASPRGEPRAPWVEQEGPEYWDRETQKYK |
| | RQAQTDRVSLRNLRGYYNQSEAGSHTLQWMYGCDLGPDGRLLRGYDQSAYDGKDYIALNEDLRSWTAA |
| | DTAAQITQRKWEAARAAEQQRAYLEGTCVEWLRRYLENGKETLQRAEHPKTHVTHHLVSDHEATLRCW |
| | ALGFYPAEITLTWQRDGEDQTQDTELVETRPAGDGTFQKWAAVVVPSGEEQRYTCHVQHEGLPEPLTL |
| | RWEPSS |
| | (HLA-C*16:01 soluble) |
| 44 | CSHSMRYFYTAVSRPGRGEPRFIAVGYVDDTQFVQFDSDAASPRGEPRAPWVEQEGPEYWDRETQKYK |
| | RQAQTDRVSLRNLRGYYNQSEAGSHTLQRMYGCDLGPDGRLLRGYNQFAYDGKDYIALNEDLRSWTAA |
| | DKAAQITQRKWEAAREAEQRRAYLEGTCVEWLRRYLENGKKTLQRAEHPKTHVTHHPVSDHEATLRCW |
| | ALGFYPAEITLTWQRDGEDQTQDTELVETRPAGDGTFQKWAAVVVPSGEEQRYTCHVQHEGLPEPLTL |
| | RWGPSS |
| | (HLA-C*08:02 soluble) |
| 45 | CSHSMRYFDTAVSRPGRGEPRFISVGYVDDTQFVRFDSDAASPRGEPRAPWVEQEGPEYWDRETQNYK |
| | RQAQADRVSLRNLRGYYNQSEDGSHTLQRMYGCDLGPDGRLLRGYDQSAYDGKDYIALNEDLRSWTAA |
| | DTAAQITQRKLEAARAAEQLRAYLEGTCVEWLRRYLENGKETLQRAEPPKTHVTHHPLSDHEATLRCW |
| | ALGFYPAEITLTWQRDGEDQTQDTELVETRPAGDGTFQKWAAVVVPSGQEQRYTCHMQHEGLQEPLTL |
| | SWEPSS |
| | (HLA-C*07:01 soluble) |
| 46 | CSHSMRYFYTAVSRPGRGEPRFIAVGYVDDTQFVQFDSDAASPRGEPRAPWVEQEGPEYWDRETQKYK |
| | RQAQTDRVNLRKLRGYYNQSEAGSHTLQRMYGCDLGPDGRLLRGYNQFAYDGKDYIALNEDLRSWTAA |
| | DKAAQITQRKWEAAREAEQRRAYLEGTCVEWLRRYLENGKKTLQRAEHPKTHVTHHPVSDHEATLRCW |
| | ALGFYPAEITLTWQRDGEDQTQDTELVETRPAGDGTFQKWAAVVVPSGEEQRYTCHVQHEGLPEPLTL |
| | RWGPSS |
| | (HLA-C*05:01 soluble) |
| 47 | GSHSMRYFYTAMSRPGRGEPRFITVGYVDDTLFVRFDSDATSPRKEPRAPWIEQEGPEYWDRETQISK |
| | TNTQTYRENLRTALRYYNQSEAGSHIIQRMYGCDVGPDGRLLRGYDQDAYDGKDYIALNEDLSSWTAA |
| | DTAAQITQRKWEAARVAEQDRAYLEGLCVESLRRYLENGKETLQRADPPKTHVTHHPISDHEVTLRCW |
| | ALGFYPAEITLTWQRDGEDQTQDTELVETRPAGDRTFQKWAAVVVPSGEEQRYTCHVQHEGLPKPLTL |
| | RWEPSS |
| | (HLA-B*44:02 soluble) |
| 48 | GSHSMRYFTTSVSRPGRGEPRFIAVGYVDDTQFVRFDSDAASQRMEPRAPWIEQEGPEYWDLQTRNVK |
| | AQSQTDRANLGTLRGYYNQSEAGSHTIQMMYGCDVGSDGRFLRGYRQDAYDGKDYIALNEDLRSWTAA |
| | DMAAQITQRKWEAARVAEQLRAYLEGTCVEWLRRYLENGKETLQRTDAPKTHMTHHAVSDHEATLRCW |
| | ALSFYPAEITLTWQRDGEDQTQDTELVETRPAGDGTFQKWASVVVPSGQEQRYTCHVQHEGLPKPLTL |
| | RWEPSS |
| | (HLA-A*29:02 soluble) |
| 49 | GSHSMRYFYTAMSRPGRGEPRFITVGYVDDTLFVRFDSDATSPRKEPRAPWIEQEGPEYWDRETQISK |
| | TNTQTYRENLRTALRYYNQSEAGSHIIQRMYGCDVGPDGRLLRGYDQDAYDGKDYIALNEDLSSWTAA |
| | DTAAQITQRKWEAARVAEQLRAYLEGLCVESLRRYLENGKETLQRADPPKTHVTHHPISDHEVTLRCW |
| | ALGFYPAEITLTWQRDGEDQTQDTELVETRPAGDRTFQKWAAVVVPSGEEQRYTCHVQHEGLPKPLTL |
| | RWEPSS |
| | (HLA-B*44:03 soluble) |
| 50 | GSHSMRYFYTAVSRPGRGEPHFIAVGYVDDTQFVRFDSDAASPRGEPRAPWVEQEGPEYWDRETQKYK |
| | RQAQTDRVSLRNLRGYYNQSEAGSHIIQRMYGCDVGPDGRLLRGYDQYAYDGKDYIALNEDLRSWTAA |
| | DTAAQITQRKWEAAREAEQLRAYLEGLCVEWLRRYLKNGKETLQRAEHPKTHVTHHPVSDHEATLRCW |
| | ALGFYPAEITLTWQWDGEDQTQDTELVETRPAGDGTFQKWAAVVVPSGEEQRYTCHVQHEGLPEPLTL |
| | RWEPSS |
| | (HLA-C*03:04 soluble) |
| 51 | GSHSMRYFHTAMSRPGRGEPRFITVGYVDDTLFVRFDSDATSPRKEPRAPWIEQEGPEYWDRETQISK |
| | TNTQTYRESLRNLRGYYNQSEAGSHTLQRMYGCDVGPDGRLLRGHNQYAYDGKDYIALNEDLRSWTAA |
| | DTAAQISQRKLEAARVAEQLRAYLEGECVEWLRRYLENGKDKLERADPPKTHVTHHPISDHEATLRCW |
| | ALGFYPAEITLTWQRDGEDQTQDTELVETRPAGDRTFQKWAAVVVPSGEEQRYTCHVQHEGLPKPLTL |
| | RWEPSS |
| | (HLA-B*40:01 soluble) |
| 52 | CSHSMRYFDTAVSRPGRGEPRFISVGYVDDTQFVRFDSDAASPRGEPRAPWVEQEGPEYWDRETQKYK |
| | RQAQADRVNLRKLRGYYNQSEDGSHTLQWMYGCDLGPDGRLLRGYDQSAYDGKDYIALNEDLRSWTAA |
| | DTAAQITQRKWEAAREAEQWRAYLEGTCVEWLRRYLENGKETLQRAEHPKTHVTHHPVSDHEATLRCW |
| | ALGFYPAEITLTWQRDGEDQTQDTELVETRPAGDGTFQKWAAVVVPSGEEQRYTCHVQHEGLPEPLTL |
| | RWEPSS |
| | (HLA-C*06:02 soluble) |
| 53 | GSHSMRYFYTAMSRPGRGEPRFIAVGYVDDTQFVRFDSDAASPRMAPRAPWIEQEGPEYWDRETQISK |
| | TNTQTYRESLRNLRGYYNQSEAGSHTLQRMYGCDVGPDGRLLRGHDQSAYDGKDYIALNEDLSSWTAA |
| | DTAAQITQRKWEAAREAEQWRAYLEGLCVEWLRRYLENGKETLQRADPPKTHVTHHPISDHEATLRCW |
| | ALGFYPAEITLTWQRDGEDQTQDTELVETRPAGDRTFQKWAAVVVPSGEEQRYTCHVQHEGLPKPLTL |
| | RWEPSS |
| | (HLA-B*15:01 soluble) |
| 54 | GSHSMRYFYTAVSRPGRGEPHFIAVGYVDDTQFVRFDSDAASPRGEPRAPWVEQEGPEYWDRETQKYK |
| | RQAQTDRVSLRNLRGYYNQSEARSHIIQRMYGCDVGPDGRLLRGYDQYAYDGKDYIALNEDLRSWTAA |
| | DTAAQITQRKWEAAREAEQLRAYLEGLCVEWLRRYLKNGKETLQRAEHPKTHVTHHPVSDHEATLRCW |
| | ALGFYPAEITLTWQWDGEDQTQDTELVETRPAGDGTFQKWAAVVVPSGEEQRYTCHVQHEGLPEPLTL |
| | RWEPSS |
| | (HLA-C*03:03 soluble) |
| 55 | GSHSMRYFSTSVSRPGSGEPRFIAVGYVDDTQFVRFDSDAASQRMEPRAPWIEQERPEYWDQETRNVK |
| | AQSQTDRVDLGTLRGYYNQSEAGSHTIQIMYGCDVGSDGRFLRGYEQHAYDGKDYIALNEDLRSWTAA |
| | DMAAQITQRKWEAARWAEQLRAYLEGTCVEWLRRYLENGKETLQRTDPPKTHMTHHPISDHEATLRCW |
| | ALGFYPAEITLTWQRDGEDQTQDTELVETRPAGDGTFQKWAAVVVPSGEEQRYTCHVQHEGLPKPLTL |
| | RWELSS |
| | (HLA-A*30:01 soluble) |
| 56 | GSHSMRYFYTAMSRPGRGEPRFITVGYVDDTQFVRFDSDATSPRMAPRAPWIEQEGPEYWDRETQISK |
| | TNTQTYRENLRTALRYYNQSEAGSHTWQTMYGCDLGPDGRLLRGHNQLAYDGKDYIALNEDLSSWTAA |
| | DTAAQITQLKWEAARVAEQLRAYLEGECVEWLRRYLENGKETLQRADPPKTHVTHHPISDHEATLRCW |
| | ALGFYPAEITLTWQRDGEDQTQDTELVETRPAGDRTFQKWAAVVVPSGEEQRYTCHVQHEGLPKPLTL |
| | RWEPSS |
| | (HLA-B*13:02 soluble) |
| 57 | CSHSMRYFYTAVSRPGRGEPRFIAVGYVDDTQFVRFDSDAASPRGEPRAPWVEQEGPEYWDRETQKYK |
| | RQAQADRVSLRNLRGYYNQSEAGSHTLQWMYGCDLGPDGRLLRGYDQSAYDGKDYIALNEDLRSWTAA |
| | DTAAQITQRKWEAAREAEQWRAYLEGTCVEWLRRYLENGKETLQRAEHPKTHVTHHPVSDHEATLRCW |
| | ALGFYPAEITLTWQRDGEDQTQDTELVETRPAGDGTFQKWAAVVVPSGEEQRYTCHVQHEGLPEPLTL |
| | RWEPSS |
| | (HLA-C*12:03 soluble) |
| 58 | GSHSMRYFYTSVSRPGRGEPRFIAVGYVDDTQFVRFDSDAASQRMEPRAPWIEQEGPEYWDRNTRNVK |
| | AHSQTDRANLGTLRGYYNQSEDGSHTIQRMYGCDVGPDGRFLRGYQQDAYDGKDYIALNEDLRSWTAA |
| | DMAAQITQRKWETAHEAEQWRAYLEGRCVEWLRRYLENGKETLQRTDAPKTHMTHHAVSDHEATLRCW |
| | ALSFYPAEITLTWQRDGEDQTQDTELVETRPAGDGTFQKWASVVVPSGQEQRYTCHVQHEGLPKPLTL |
| | RWEPSS |
| | (HLA-A*26:01 soluble) |
| 59 | GSHSMRYFYTSVSRPGRGEPRFISVGYVDDTQFVRFDSDAASPREEPRAPWIEQEGPEYWDRNTQICK |
| | TNTQTYRENLRIALRYYNQSEAGSHTLQRMYGCDVGPDGRLLRGHNQFAYDGKDYIALNEDLSSWTAA |
| | DTAAQITQRKWEAARVAEQLRTYLEGTCVEWLRRYLENGKETLQRADPPKTHVTHHPISDHEATLRCW |
| | ALGFYPAEITLTWQRDGEDQTQDTELVETRPAGDRTFQKWAAVVVPSGEEQRYTCHVQHEGLPKPLTL |
| | RWEPSS |
| | (HLA-B*38:01 soluble) |
| 60 | GSHSMRYFYTAVSRPGRGEPRFISVGYVDDTQFVRFDSDAASPREEPRAPWIEQEGPEYWDRNTQICK |
| | TNTQTDRESLRNLRGYYNQSEAGSHTLQWMYGCDVGPDGRLLRGYNQFAYDGKDYIALNEDLSSWTAA |
| | DTAAQITQRKWEAAREAEQLRAYLEGTCVEWLRRHLENGKETLQRADPPKTHVTHHPISDHEATLRCW |
| | ALGFYPAEITLTWQRDGEDQTQDTELVETRPAGDRTFQKWAAVVVPSGEEQRYTCHVQHEGLPKPLTL |
| | RWEPSS |
| | (HLA-B*14:02 soluble) |
| 61 | GSHSMRYFTTSVSRPGRGEPRFIAVGYVDDTQFVRFDSDAASQRMEPRAPWIEQEGPEYWDRNTRNVK |
| | AHSQIDRVDLGTLRGYYNQSEAGSHTIQMMYGCDVGSDGRFLRGYQQDAYDGKDYIALNEDLRSWTAA |
| | DMAAQITQRKWEAARVAEQLRAYLEGTCVEWLRRHLENGKETLQRTDPPRTHMTHHAVSDHEATLRCW |
| | ALSFYPAEITLTWQRDGEDQTQDTELVETRPAGDGTFQKWASVVVPSGQEQRYTCHVQHEGLPKPLTL |
| | RWEPSS |
| | (HLA-A*33:01 soluble) |
| 62 | GSHSMRYFSTSVSRPGRGEPRFIAVGYVDDTQFVRFDSDAASQRMEPRAPWIEQEGPEYWDEETGKVK |
| | AHSQTDRENLRIALRYYNQSEAGSHTLQMMFGCDVGSDGRFLRGYHQYAYDGKDYIALKEDLRSWTAA |
| | DMAAQITQRKWEAARVAEQLRAYLEGTCVDGLRRYLENGKETLQRTDPPKTHMTHHPISDHEATLRCW |
| | ALGFYPAEITLTWQRDGEDQTQDTELVETRPAGDGTFQKWAAVVVPSGEEQRYTCHVQHEGLPKPLTL |
| | RWEPSS |
| | (HLA-A*23:01 soluble) |
| 63 | GSHSMRYFYTSVSRPGRGEPRFIAVGYVDDTQFVRFDSDAASQRMEPRAPWIEQEGPEYWDRNTRNVK |
| | AHSQTDRESLRIALRYYNQSEDGSHTIQRMYGCDVGPDGRFLRGYQQDAYDGKDYIALNEDLRSWTAA |
| | DMAAQITQRKWETAHEAEQWRAYLEGRCVEWLRRYLENGKETLQRTDAPKTHMTHHAVSDHEATLRCW |
| | ALSFYPAEITLTWQRDGEDQTQDTELVETRPAGDGTFQKWASVVVPSGQEQRYTCHVQHEGLPKPLTL |
| | RWEPSS |
| | (HLA-A*25:01 soluble) |
| 64 | GSHSMRYFHTSVSRPGRGEPRFISVGYVDGTQFVRFDSDAASPRTEPRAPWIEQEGPEYWDRNTQISK |
| | TNTQTYRESLRNLRGYYNQSEAGSHTLQRMYGCDVGPDGRLLRGHDQSAYDGKDYIALNEDLSSWTAA |
| | DTAAQITQRKWEAARVAEQLRAYLEGTCVEWLRRHLENGKETLQRADPPKTHVTHHPISDHEATLRCW |
| | ALGFYPAEITLTWQRDGEDQTQDTELVETRPAGDRTFQKWAAVVVPSGEEQRYTCHVQHEGLPKPLTL |
| | RWEPSS |
| | (HLA-B*18:01 soluble) |
| 65 | GSHSMRYFHTSVSRPGRGEPRFISVGYVDDTQFVRFDSDAASPRTEPRAPWIEQEGPEYWDRETQISK |
| | TNTQTYRFDLRTLLRYYNQSEAGSHTIQRMSGCDVGPDGRLLRGYNQFAYDGKDYIALNEDLSSWTAA |
| | DTAAQITQRKWEAARVAEQDRAYLEGTCVEWLRRYLENGKETLQRADPPKTHVTHHPISDHEATLRCW |
| | ALGFYPAEITLTWQRDGEDQTQDTELVETRPAGDRTFQKWAAVVVPSGEEQRYTCHVQHEGLPKPLTL |
| | RWEPSS |
| | (HLA-B*37:01 soluble) |
| 66 | GSHSMRYFYTAMSRPGRGEPRFIAVGYVDDTQFVRFDSDAASPRTEPRAPWIEQEGPEYWDRNTQIFK |
| | TNTQTYRENLRIALRYYNQSEAGSHTWQTMYGCDVGPDGRLLRGHNQYAYDGKDYIALNEDLSSWTAA |
| | DTAAQITQRKWEAAREAEQLRAYLEGLCVEWLRRHLENGKETLQRADPPKTHVTHHPVSDHEATLRCW |
| | ALGFYPAEITLTWQRDGEDQTQDTELVETRPAGDRTFQKWAAVVVPSGEEQRYTCHVQHEGLPKPLTL |
| | RWEPSS |
| | (HLA-B*51:01 soluble) |
| 67 | CSHSMRYFSTSVSRPGRGEPRFIAVGYVDDTQFVRFDSDAASPRGEPRAPWVEQEGPEYWDRETQKYK |
| | RQAQTDRVSLRNLRGYYNQSEAGSHTLQWMFGCDLGPDGRLLRGYDQSAYDGKDYIALNEDLRSWTAA |
| | DTAAQITQRKWEAAREAEQRRAYLEGTCVEWLRRYLENGKETLQRAEHPKTHVTHHPVSDHEATLRCW |
| | ALGFYPAEITLTWQWDGEDQTQDTELVETRPAGDGTFQKWAAVVVPSGEEQRYTCHVQHEGLPEPLTL |
| | RWEPSS |
| | (HLA-C*14:02 soluble) |
| 68 | CSHSMRYFYTAVSRPGRGEPHFIAVGYVDDTQFVRFDSDAASPRGEPRAPWVEQEGPEYWDRETQNYK |
| | RQAQTDRVNLRKLRGYYNQSEAGSHIIQRMYGCDLGPDGRLLRGHDQLAYDGKDYIALNEDLRSWTAA |
| | DTAAQITQRKWEAAREAEQLRAYLEGTCVEWLRRYLENGKETLQRAEHPKTHVTHHPVSDHEATLRCW |
| | ALGFYPAEITLTWQRDGEDQTQDTELVETRPAGDGTFQKWAAVVVPSGEEQRYTCHVQHEGLPEPLTL |
| | RWEPSS |
| | (HLA-C*15:02 soluble) |
| 69 | CSHSMRYFYTAVSRPSRGEPHFIAVGYVDDTQFVRFDSDAASPRGEPRAPWVEQEGPEYWDRETQKYK |
| | RQAQTDRVNLRKLRGYYNQSEAGSHTLQRMYGCDLGPDGRLLRGYDQSAYDGKDYIALNEDLRSWTAA |
| | DTAAQITQRKWEAAREAEQWRAYLEGECVEWLRRYLENGKETLQRAEHPKTHVTHHPVSDHEATLRCW |
| | ALGFYPTEITLTWQRDGEDQTQDTELVETRPAGDGTFQKWAAVVVPSGEEQRYTCHVQHEGLPEPLTL |
| | RWEPSS |
| | (HLA-C*02:02 soluble) |
| 70 | GSHSMRYFHTSVSRPGRGEPRFITVGYVDDTLFVRFDSDAASPREEPRAPWIEQEGPEYWDRETQICK |
| | AKAQTDRFDLRTLLRYYNQSEAGSHTLQNMYGCDVGPDGRLLRGYHQDAYDGKDYIALNEDLSSWTAA |
| | DTAAQITQRKWEAARVAEQLRAYLEGECVEWLRRYLENGKETLQRADPPKTHVTHHPISDHEATLRCW |
| | ALGFYPAEITLTWQRDGEDQTQDTELVETRPAGDRTFQKWAAVVVPSGEEQRYTCHVQHEGLPKPLTL |
| | RWEPSS |
| | (HLA-B*27:05 soluble) |
| 71 | GSHSMRYFTTSVSRPGRGEPRFIAVGYVDDTQFVRFDSDAASQRMEPRAPWIEQERPEYWDQETRNVK |
| | AHSQIDRVDLGTLRGYYNQSEAGSHTIQMMYGCDVGSDGRFLRGYQQDAYDGKDYIALNEDLRSWTAA |
| | DMAAQITQRKWEAARVAEQLRAYLEGTCVEWLRRYLENGKETLQRTDPPKTHMTHHAVSDHEATLRCW |
| | ALSFYPAEITLTWQRDGEDQTQDTELVETRPAGDGTFQKWASVVVPSGQEQRYTCHVQHEGLPKPLTL |
| | RWEPSS |
| | (HLA-A*31:01 soluble) |
| 72 | GSHSMRYFSTSVSRPGSGEPRFIAVGYVDDTQFVRFDSDAASQRMEPRAPWIEQERPEYWDQETRNVK |
| | AHSQTDRENLGTLRGYYNQSEAGSHTIQIMYGCDVGSDGRFLRGYEQHAYDGKDYIALNEDLRSWTAA |
| | DMAAQITQRKWEAARRAEQLRAYLEGTCVEWLRRYLENGKETLQRTDPPKTHMTHHPISDHEATLRCW |
| | ALGFYPAEITLTWQRDGEDQTQDTELVETRPAGDGTFQKWAAVVVPSGEEQRYTCHVQHEGLPKPLTL |
| | RWELSS |
| | (HLA-A*30:02 soluble) |
| 73 | GSHSMRYFYTSVSRPGRGEPRFISVGYVDDTQFVRFDSDAASPREEPRAPWIEQEGPEYWDRNTQIYK |
| | AQAQTDRESLRNLRGYYNQSEAGSHTLQSMYGCDVGPDGRLLRGHNQYAYDGKDYIALNEDLRSWTAA |
| | DTAAQITQRKWEAARVAEQDRAYLEGTCVEWLRRYLENGKDTLERADPPKTHVTHHPISDHEATLRCW |
| | ALGFYPAEITLTWQRDGEDQTQDTELVETRPAGDRTFQKWAAVVVPSGEEQRYTCHVQHEGLPKPLTL |
| | RWEPSS |
| | (HLA-B*42:01 soluble) |
| 74 | GSHSMRYFYTAVSRPGRGEPRFIAVGYVDDTQFVRFDSDAASPRGEPRAPWVEQEGPEYWDRETQKYK |
| | RQAQADRVNLRKLRGYYNQSEAGSHTIQRMYGCDLGPDGRLLRGYNQFAYDGKDYIALNEDLRSWTAA |
| | DTAAQISQRKLEAAREAEQLRAYLEGECVEWLRGYLENGKETLQRAERPKTHVTHHPVSDHEATLRCW |
| | ALGFYPAEITLTWQRDGEDQTQDTELVETRPAGDGTFQKWAAVVVPSGQEQRYTCHVQHEGLQEPCTL |
| | RWKPSS |
| | (HLA-C*17:01 soluble) |
| 75 | GSHSMRYFYTAMSRPGRGEPRFIAVGYVDDTQFVRFDSDAASPRTEPRAPWIEQEGPEYWDRNTQIFK |
| | TNTQTYRESLRNLRGYYNQSEAGSHIIQRMYGCDLGPDGRFLRGHNQYAYDGKDYIALNEDLSSWTAA |
| | DTAAQITQRKWEAARVAEQLRAYLEGLCVEWLRRYLENGKETLQRADPPKTHVTHHPVSDHEATLRCW |
| | ALGFYPAEITLTWQRDGEDQTQDTELVETRPAGDRTFQKWAAVVVPSGEEQRYTCHVQHEGLPKPLTL |
| | RWEPSS |
| | (HLA-B*35:02 soluble) |
| 76 | GSHSMRYFYTSVSRPGRGEPRFISVGYVDDTQFVRFDSDAASPREEPRAPWIEQEGPEYWDRNTQICK |
| | TNTQTDRESLRNLRGYYNQSEAGSHTWQTMYGCDVGPDGRLLRGHNQFAYDGKDYIALNEDLSSWTAA |
| | DTAAQITQRKWEAARVAEQLRTYLEGTCVEWLRRYLENGKETLQRADPPKTHVTHHPISDHEATLRCW |
| | ALGFYPAEITLTWQRDGEDQTQDTELVETRPAGDRTFQKWAAVVVPSGEEQRYTCHVQHEGLPKPLTL |
| | RWEPSS |
| | (HLA-B*39:06 soluble) |
| 77 | GSHSMRYFYTAVSRPGRGEPHFIAVGYVDDTQFVRFDSDAASPRGEPRAPWVEQEGPEYWDRETQKYK |
| | RQAQTDRVSLRNLRGYYNQSEAGSHILQRMYGCDVGPDGRLLRGYDQSAYDGKDYIALNEDLRSWTAA |
| | DTAAQITQRKWEAAREAEQLRAYLEGLCVEWLRRYLKNGKETLQRAEHPKTHVTHHPVSDHEATLRCW |
| | ALGFYPAEITLTWQWDGEDQTQDTELVETRPAGDGTFQKWAAVVVPSGEEQRYTCHVQHEGLPEPLTL |
| | RWEPSS |
| | (HLA-C*03:02 soluble) |
| 78 | GSHSMRYFYTAMSRPGRGEPRFIAVGYVDDTQFVRFDSDAASPRTEPRAPWIEQEGPEYWDGETRNMK |
| | ASAQTYRENLRIALRYYNQSEAGSHIIQRMYGCDLGPDGRLLRGHDQSAYDGKDYIALNEDLSSWTAA |
| | DTAAQITQRKWEAARVAEQLRAYLEGLCVEWLRRYLENGKETLQRADPPKTHVTHHPVSDHEATLRCW |
| | ALGFYPAEITLTWQRDGEDQTQDTELVETRPAGDRTFQKWAAVVVPSGEEQRYTCHVQHEGLPKPLTL |
| | RWEPSS |
| | (HLA-B*58:01 soluble) |
| 79 | GSHSMRYFTTSVSRPGRGEPRFIAVGYVDDTQFVRFDSDAASQRMEPRAPWIEQEGPEYWDRNTRNVK |
| | AHSQIDRVDLGTLRGYYNQSEAGSHTIQMMYGCDVGSDGRFLRGYQQDAYDGKDYIALNEDLRSWTAA |
| | DMAAQITQRKWEAARVAEQLRAYLEGTCVEWLRRYLENGKETLQRTDPPKTHMTHHAVSDHEATLRCW |
| | ALSFYPAEITLTWQRDGEDQTQDTELVETRPAGDGTFQKWASVVVPSGQEQRYTCHVQHEGLPKPLTL |
| | RWEPSS |
| | (HLA-A*33:03 soluble) |
| 80 | GSHSMRYFYTSMSRPGRGEPRFIAVGYVDDTQFVRFDSDAASQRMEPRAPWIEQEGPEYWDRNTRNVK |
| | AQSQTDRVDLGTLRGYYNQSEAGSHTIQRMYGCDVGPDGRFLRGYHQYAYDGKDYIALKEDLRSWTAA |
| | DMAAQTTKHKWEAAHVAEQWRAYLEGTCVEWLRRYLENGKETLQRTDAPKTHMTHHAVSDHEATLRCW |
| | ALSFYPAEITLTWQRDGEDQTQDTELVETRPAGDGTFQKWVAVVVPSGQEQRYTCHVQHEGLPKPLTL |
| | RWEPSS |
| | (HLA-A*68:02 soluble) |
| 81 | CSHSMKYFFTSVSRPGRGEPRFISVGYVDDTQFVRFDSDAASPRGEPRAPWVEQEGPEYWDRETQKYK |
| | RQAQTDRVSLRNLRGYYNQSEAGSHTLQWMCGCDLGPDGRLLRGYDQYAYDGKDYIALNEDLRSWTAA |
| | DTAAQITQRKWEAAREAEQRRAYLEGTCVEWLRRYLENGKETLQRAEHPKTHVTHHPVSDHEATLRCW |
| | ALGFYPAEITLTWQWDGEDQTQDTELVETRPAGDGTFQKWAAVMVPSGEEQRYTCHVQHEGLPEPLTL |
| | RWEPSS |
| | (HLA-C*01:02 soluble) |
| 82 | CSHSMRYFDTAVSRPGRGEPRFISVGYVDDTQFVRFDSDAASPRGEPRAPWVEQEGPEYWDRETQKYK |
| | RQAQADRVSLRNLRGYYNQSEDGSHTFQRMYGCDLGPDGRLLRGYDQFAYDGKDYIALNEDLRSWTAA |
| | DTAAQITQRKLEAARAAEQDRAYLEGTCVEWLRRYLENGKKTLQRAEPPKTHVTHHPLSDHEATLRCW |
| | ALGFYPAEITLTWQRDGEDQTQDTELVETRPAGDGTFQKWAAVVVPSGQEQRYTCHMQHEGLQEPLTL |
| | SWEPSS |
| | (HLA-C*07:04 soluble) |
| 83 | GSHSMRYFYTSVSRPGRGEPRFIAVGYVDDTQFVRFDSDAASQRMEPRAPWIEQEGPEYWDRNTRNVK |
| | AQSQTDRVDLGTLRGYYNQSEAGSHTIQMMYGCDVGSDGRFLRGYRQDAYDGKDYIALKEDLRSWTAA |
| | DMAAQTTKHKWEAAHVAEQWRAYLEGTCVEWLRRYLENGKETLQRTDAPKTHMTHHAVSDHEATLRCW |
| | ALSFYPAEITLTWQRDGEDQTQDTELVETRPAGDGTFQKWVAVVVPSGQEQRYTCHVQHEGLPKPLTL |
| | RWEPSS |
| | (HLA-A*68:01 soluble) |
| 84 | GSHSMRYFFTSVSRPGRGEPRFIAVGYVDDTQFVRFDSDAASQRMEPRAPWIEQEGPEYWDQETRNVK |
| | AHSQTDRESLRIALRYYNQSEAGSHTIQMMYGCDVGPDGRLLRGYQQDAYDGKDYIALNEDLRSWTAA |
| | DMAAQITQRKWEAARVAEQLRAYLEGTCVEWLRRYLENGKETLQRTDAPKTHMTHHAVSDHEATLRCW |
| | ALSFYPAEITLTWQRDGEDQTQDTELVETRPAGDGTFQKWASVVVPSGQEQRYTCHVQHEGLPKPLTL |
| | RWEPSS |
| | (HLA-A*32:01 soluble) |
| 85 | GSHSMRYFHTAMSRPGRGEPRFITVGYVDDTLFVRFDSDATSPRKEPRAPWIEQEGPEYWDRETQISK |
| | TNTQTYRENLRIALRYYNQSEAGSHTWQRMYGCDLGPDGRLLRGYNQLAYDGKDYIALNEDLSSWTAA |
| | DTAAQITQRKWEAAREAEQLRAYLEGLCVEWLRRYLENGKETLQRADPPKTHVTHHPISDHEATLRCW |
| | ALGFYPAEITLTWQRDGEDQTQDTELVETRPAGDRTFQKWAAVVVPSGEEQRYTCHVQHEGLPKPLTL |
| | RWEPSS |
| | (HLA-B*49:01 soluble) |
| 86 | GSHSMRYFYTAMSRPGRGEPRFIAVGYVDDTQFVRFDSDAASPRTEPRAPWIEQEGPEYWDRNTQIFK |
| | TNTQTYRENLRIALRYYNQSEAGSHIIQRMYGCDLGPDGRLLRGHDQSAYDGKDYIALNEDLSSWTAA |
| | DTAAQITQRKWEAARVAEQLRAYLEGLCVEWLRRYLENGKETLQRADPPKTHVTHHPVSDHEATLRCW |
| | ALGFYPAEITLTWQRDGEDQTQDTELVETRPAGDRTFQKWAAVVVPSGEEQRYTCHVQHEGLPKPLTL |
| | RWEPSS |
| | (HLA-B*53:01 soluble) |
| 87 | GSHSMRYFHTAMSRPGRGEPRFITVGYVDDTLFVRFDSDATSPRKEPRAPWIEQEGPEYWDRETQISK |
| | TNTQTYRESLRNLRGYYNQSEAGSHTWQRMYGCDLGPDGRLLRGYNQLAYDGKDYIALNEDLSSWTAA |
| | DTAAQITQRKWEAAREAEQLRAYLEGLCVEWLRRYLENGKETLQRADPPKTHVTHHPISDHEATLRCW |
| | ALGFYPAEITLTWQRDGEDQTQDTELVETRPAGDRTFQKWAAVVVPSGEEQRYTCHVQHEGLPKPLTL |
| | RWEPSS |
| | (HLA-B*50:01 soluble) |
| 88 | GSHSMRYFYTSVSRPGRGEPRFIAVGYVDDTQFVRFDSDAASRRMEPRAPWIEQEGPEYWDGETRKVK |
| | AHSQTHRVDLGTLRGYYNQSEAGSHTLQRMYGCDVGSDWRFLRGYHQYAYDGKDYIALKEDLRSWTAA |
| | DMAAQTTKHKWEAAHVAEQWRAYLEGTCVEWLRRYLENGKETLQRTDAPKTHMTHHAVSDHEATLRCW |
| | ALSFYPAEITLTWQRDGEDQTQDTELVETRPAGDGTFQKWAAVVVPSGQEQRYTCHVQHEGLPKPLTL |
| | RWEPSS |
| | (HLA-A*02:05 soluble) |
| 89 | GSHSMRYFYTAMSRPGRGEPRFIAVGYVDDTQFVRFDSDAASPREEPRAPWIEQEGPEYWDRNTQIYK |
| | AQAQTDRESLRNLRGYYNQSEAGSHTWQTMYGCDLGPDGRLLRGHNQLAYDGKDYIALNEDLSSWTAA |
| | DTAAQITQRKWEAAREAEQLRAYLEGTCVEWLRRYLENGKETLQRADPPKTHVTHHPISDHEATLRCW |
| | ALGFYPAEITLTWQRDGEDQTQDTELVETRPAGDRTFQKWAAVVVPSGEEQRYTCHVQHEGLPKPLTL |
| | RWEPSS |
| | (HLA-B*55:01 soluble) |
| 90 | GSHSMRYFHTAMSRPGRGEPRFITVGYVDDTLFVRFDSDATSPRKEPRAPWIEQEGPEYWDRETQISK |
| | TNTQTYRESLRNLRGYYNQSEAGSHTWQRMYGCDLGPDGRLLRGYNQLAYDGKDYIALNEDLSSWTAA |
| | DTAAQITQRKWEAARVAEQDRAYLEGLCVESLRRYLENGKETLQRADPPKTHVTHHPISDHEATLRCW |
| | ALGFYPAEITLTWQRDGEDQTQDTELVETRPAGDRTFQKWAAVVVPSGEEQRYTCHVQHEGLPKPLTL |
| | RWEPSS |
| | (HLA-B*45:01 soluble) |
| 91 | GSHSMRYFYTAMSRPGRGEPRFIAVGYVDDTQFVRFDSDAASPRTEPRAPWIEQEGPEYWDRETQISK |
| | TNTQTYRENLRIALRYYNQSEAGSHTWQTMYGCDVGPDGRLLRGHNQYAYDGKDYIALNEDLSSWTAA |
| | DTAAQITQRKWEAAREAEQLRAYLEGLCVEWLRRHLENGKETLQRADPPKTHVTHHPVSDHEATLRCW |
| | ALGFYPAEITLTWQRDGEDQTQDTELVETRPAGDRTFQKWAAVVVPSGEEQRYTCHVQHEGLPKPLTL |
| | RWEPSS |
| | (HLA-B*52:01 soluble) |
| 92 | CSHSMRYFYTAVSRPGRGEPRFIAVGYVDDTQFVRFDSDAASPRGEPRAPWVEQEGPEYWDRETQKYK |
| | RQAQADRVSLRNLRGYYNQSEAGSHTLQRMYGCDLGPDGRLLRGYDQSAYDGKDYIALNEDLRSWTAA |
| | DTAAQITQRKWEAAREAEQWRAYLEGTCVEWLRRYLENGKETLQRAEHPKTHVTHHPVSDHEATLRCW |
| | ALGFYPAEITLTWQRDGEDQTQDTELVETRPAGDGTFQKWAAVVVPSGEEQRYTCHVQHEGLPEPLTL |
| | RWEPSS |
| | (HLA-C*12:02 soluble) |
| 93 | GSHSMRYFYTAMSRPGRGEPRFIAVGYVDDTQFVRFDSDAASPRTEPRAPWIEQEGPEYWDRNTQIFK |
| | TNTQTYRESLRNLRGYYNQSEAGSHIIQRMYGCDLGPDGRLLRGHDQFAYDGKDYIALNEDLSSWTAA |
| | DTAAQITQRKWEAARVAEQLRAYLEGLCVEWLRRYLENGKETLQRADPPKTHVTHHPVSDHEATLRCW |
| | ALGFYPAEITLTWQRDGEDQTQDTELVETRPAGDRTFQKWAAVVVPSGEEQRYTCHVQHEGLPKPLTL |
| | RWEPSS |
| | (HLA-B*35:03 soluble) |
| 94 | GSHSMRYFHTSVSRPGRGEPRFITVGYVDDTLFVRFDSDATSPRKEPRAPWIEQEGPEYWDRETQISK |
| | TNTQTYRESLRNLRGYYNQSEAGSHTLQSMYGCDVGPDGRLLRGHNQYAYDGKDYIALNEDLRSWTAA |
| | DTAAQITQRKWEAARVAEQLRAYLEGECVEWLRRYLENGKETLQRADPPKTHVTHHPISDHEATLRCW |
| | ALGFYPAEITLTWQRDGEDQTQDTELVETRPAGDRTFQKWAAVVVPSGEEQRYTCHVQHEGLPKPLTL |
| | RWEPSS |
| | (HLA-B*40:02 soluble) |
| 95 | GSHSMRYFYTAMSRPGRGEPRFISVGYVDDTQFVRFDSDAASPREEPRAPWIEQEGPEYWDRETQISK |
| | TNTQTYRESLRNLRGYYNQSEAGSHTLQRMYGCDVGPDGRLLRGHDQSAYDGKDYIALNEDLSSWTAA |
| | DTAAQITQRKWEAAREAEQLRAYLEGLCVEWLRRYLENGKETLQRADPPKTHVTHHPISDHEATLRCW |
| | ALGFYPAEITLTWQRDGEDQTQDTELVETRPAGDRTFQKWAAVVVPSGEEQRYTCHVQHEGLPKPLTL |
| | RWEPSS |
| | (HLA-B*15:03 soluble) |
| 96 | GSHSMRYFFTSVSRPGRGEPRFIAVGYVDDTQFVRFDSDAASQRMEPRAPWIEQEGPEYWDQETRNVK |
| | AHSQTDRVDLGTLRGYYNQSEAGSHTIQMMYGCDVGPDGRLLRGYQQDAYDGKDYIALNEDLRSWTAA |
| | DMAAQITQRKWEAARVAEQLRAYLEGTCVEWLRRYLENGKETLQRTDAPKTHMTHHAVSDHEATLRCW |
| | ALSFYPAEITLTWQRDGEDQTQDTELVETRPAGDGTFQKWASVVVPSGQEQRYTCHVQHEGLPKPLTL |
| | RWEPSS |
| | (HLA-A*74:01 soluble) |
| 97 | IKEEHVIIQAEFYLNPDQSGEFMFDFDGDEIFHVDMAKKETVWRLEEFGRFASFEAQGALANIAVDKA |
| | NLEIMTKRSNYTPITNVPPEVTVLTNSPVELREPNVLICFIDKFTPPVVNVTWLRNGKPVTTGVSETV |
| | FLPRFDHLFRKFHYLPFLPSTEDVYDCRVEHWGLDEPLLKHWEFDAPSPLPETTE |
| | (HLA-DRA*01:01 soluble) |
| 98 | GDTRPRFLWQLKFECHFFNGTERVRLLERCIYNQEESVRFDSDVGEYRAVTELGRPDAEYWNSQKDLL |
| | EQRRAAVDTYCRHNYGVGESFTVQRRVEPKVTVYPSKTQPLQHHNLLVCSVSGFYPGSIEVRWFRNGQ |
| | EEKAGVVSTGLIQNGDWTFQTLVMLETVPRSGEVYTCQVEHPSVTSPLTVEWRARSESAQSK |
| | (HLA-DRB1*01:01 soluble) |
| 99 | GDTRPRFLWQLKFECHFFNGTERVRLLERCIYNQEESVRFDSDVGEYRAVTELGRPDAEYWNSQKDLL |
| | EQRRAAVDTYCRHNYGAVESFTVQRRVEPKVTVYPSKTQPLQHHNLLVCSVSGFYPGSIEVRWFRNGQ |
| | EEKAGVVSTGLIQNGDWTFQTLVMLETVPRSGEVYTCQVEHPSVTSPLTVEWRARSESAQSK |
| | (HLA-DRB1*01:02 soluble) |
| 100 | GDTRPRFLEYSTSECHFFNGTERVRYLDRYFHNQEENVRFDSDVGEFRAVTELGRPDAEYWNSQKDLL |
| | EQKRGRVDNYCRHNYGVVESFTVQRRVHPKVTVYPSKTQPLQHHNLLVCSVSGFYPGSIEVRWFRNGQ |
| | EEKTGVVSTGLIHNGDWTFQTLVMLETVPRSGEVYTCQVEHPSVTSPLTVEWRARSESAQSK |
| | (HLA-DRB1*03:01 soluble) |
| 101 | GDTRPRFLEQVKHECHFFNGTERVRFLDRYFYHQEEYVRFDSDVGEYRAVTELGRPDAEYWNSQKDLL |
| | EQKRAAVDTYCRHNYGVGESFTVQRRVYPEVTVYPAKTQPLQHHNLLVCSVNGFYPGSIEVRWFRNGQ |
| | EEKTGVVSTGLIQNGDWTFQTLVMLETVPRSGEVYTCQVEHPSLTSPLTVEWRARSESAQSK |
| | (HLA-DRB1*04:01 soluble) |
| 102 | GDTRPRFLEQVKHECHFFNGTERVRFLDRYFYHQEEYVRFDSDVGEYRAVTELGRPDAEYWNSQKDLL |
| | EQRRAAVDTYCRHNYGVVESFTVQRRVYPEVTVYPAKTQPLQHHNLLVCSVNGFYPGSIEVRWFRNGQ |
| | EEKTGVVSTGLIQNGDWTFQTLVMLETVPRSGEVYTCQVEHPSLTSPLTVEWRARSESAQSK |
| | (HLA-DRB1*04:04 soluble) |
| 103 | GDTQPRFLWQGKYKCHFFNGTERVQFLERLFYNQEEFVRFDSDVGEYRAVTELGRPVAESWNSQKDIL |
| | EDRRGQVDTVCRHNYGVGESFTVQRRVHPEVTVYPAKTQPLQHHNLLVCSVSGFYPGSIEVRWFRNGQ |
| | EEKAGVVSTGLIQNGDWTFQTLVMLETVPRSGEVYTCQVEHPSVMSPLTVEWRARSESAQSK |
| | (HLA-DRB1*07:01 soluble) |
| 104 | GDTRPRFLEYSTGECYFFNGTERVRFLDRYFYNQEEYVRFDSDVGEYRAVTELGRPSAEYWNSQKDFL |
| | EDRRALVDTYCRHNYGVGESFTVQRRVHPKVTVYPSKTQPLQHHNLLVCSVSGFYPGSIEVRWFRNGQ |
| | EEKTGVVSTGLIHNGDWTFQTLVMLETVPRSGEVYTCQVEHPSVTSPLTVEWSARSESAQSK |
| | (HLA-DRB1*08:01 soluble) |
| 105 | GDTRPRFLEEVKFECHFFNGTERVRLLERRVHNQEEYARYDSDVGEYRAVTELGRPDAEYWNSQKDLL |
| | ERRRAAVDTYCRHNYGVGESFTVQRRVQPKVTVYPSKTQPLQHHNLLVCSVNGFYPGSIEVRWFRNGQ |
| | EEKTGVVSTGLIQNGDWTFQTLVMLETVPQSGEVYTCQVEHPSVMSPLTVEWRARSESAQSK |
| | (HLA-DRB1*10:01 soluble) |
| 106 | GDTRPRFLEYSTSECHFFNGTERVRFLDRYFYNQEEYVRFDSDVGEFRAVTELGRPDEEYWNSQKDFL |
| | EDRRAAVDTYCRHNYGVGESFTVQRRVHPKVTVYPSKTQPLQHHNLLVCSVSGFYPGSIEVRWFRNGQ |
| | EEKTGVVSTGLIHNGDWTFQTLVMLETVPRSGEVYTCQVEHPSVTSPLTVEWRARSESAQSK |
| | (HLA-DRB1*11:01 soluble) |
| 107 | GDTRPRFLEYSTSECHFFNGTERVRFLDRYFYNQEEYVRFDSDVGEFRAVTELGRPDEEYWNSQKDEL |
| | EDRRAAVDTYCRHNYGVVESFTVQRRVHPKVTVYPSKTQPLQHHNLLVCSVSGFYPGSIEVRWFRNGQ |
| | EEKTGVVSTGLIHNGDWTFQTLVMLETVPRSGEVYTCQVEHPSVTSPLTVEWRARSESAQSK |
| | (HLA-DRB1*11:04 soluble) |
| 108 | GDTRPRFLEYSTSECHFENGTERVRFLDRYFHNQEENVRFDSDVGEFRAVTELGRPDAEYWNSQKDIL |
| | EDERAAVDTYCRHNYGVVESFTVQRRVHPKVTVYPSKTQPLQHHNLLVCSVSGFYPGSIEVRWFRNGQ |
| | EEKTGVVSTGLIHNGDWTFQTLVMLETVPRSGEVYTCQVEHPSVTSPLTVEWRARSESAQSK |
| | (HLA-DRB1*13:01 soluble) |
| 109 | GDTRPRFLEYSTSECHFFNGTERVRFLDRYFHNQEENVRFDSDVGEFRAVTELGRPDAEYWNSQKDIL |
| | EDERAAVDTYCRHNYGVGESFTVQRRVHPKVTVYPSKTQPLQHHNLLVCSVSGFYPGSIEVRWFRNGQ |
| | EEKTGVVSTGLIHNGDWTFQTLVMLETVPRSGEVYTCQVEHPSVTSPLTVEWRARSESAQSK |
| | (HLA-DRB1*13:02 soluble) |
| 110 | GDTRPRFLEYSTSECHFFNGTERVRFLDRYFHNQEEFVRFDSDVGEYRAVTELGRPAAEHWNSQKDLL |
| | ERRRAEVDTYCRHNYGVVESFTVQRRVHPKVTVYPSKTQPLQHYNLLVCSVSGFYPGSIEVRWFRNGQ |
| | EEKTGVVSTGLIHNGDWTFQTLVMLETVPRSGEVYTCQVEHPSVTSPLTVEWRARSESAQSK |
| | (HLA-DRB1*14:01 soluble) |
| 111 | GDTRPRFLWQPKRECHFFNGTERVRFLDRYFYNQEESVRFDSDVGEFRAVTELGRPDAEYWNSQKDIL |
| | EQARAAVDTYCRHNYGVVESFTVQRRVQPKVTVYPSKTQPLQHHNLLVCSVSGFYPGSIEVRWFLNGQ |
| | EEKAGMVSTGLIQNGDWTFQTLVMLETVPRSGEVYTCQVEHPSVTSPLTVEWRARSESAQSK |
| | (HLA-DRB1*15:01 soluble) |
| 112 | GDTRPRFLWQPKRECHFFNGTERVRFLDRHFYNQEESVRFDSDVGEFRAVTELGRPDAEYWNSQKDIL |
| | EQARAAVDTYCRHNYGVVESFTVQRRVQPKVTVYPSKTQPLQHHNLLVCSVSGFYPGSIEVRWFLNGQ |
| | EEKAGMVSTGLIQNGDWTFQTLVMLETVPRSGEVYTCQVEHPSVTSPLTVEWRARSESAQSK |
| | (HLA-DRB1*15:03 soluble) |
| 113 | EDIVADHVASCGVNLYQFYGPSGQYTHEFDGDEEFYVDLERKETAWRWPEFSKFGGFDPQGALRNMAV |
| | AKHNLNIMIKRYNSTAATNEVPEVTVFSKSPVTLGQPNTLICLVDNIFPPVVNITWLSNGQSVTEGVS |
| | ETSFLSKSDHSFFKISYLTFLPSADEIYDCKVEHWGLDQPLLKHWEPEIPAPMSELTET |
| | (HLA-DQA1*01:01 soluble) |
| 114 | GRDSPEDFVYQFKGLCYFTNGTERVRGVTRHIYNREEYVRFDSDVGVYRAVTPQGRPVAEYWNSQKEV |
| | LEGARASVDRVCRHNYEVAYRGILQRRVEPTVTISPSRTEALNHHNLLICSVTDFYPSQIKVRWFRND |
| | QEETAGVVSTPLIRNGDWTFQILVMLEMTPQRGDVYTCHVEHPSLQSPITVEWRAQSESAQSK |
| | (HLA-DQB1*05:01 soluble) |
| 115 | EDIVADHVASCGVNLYQFYGPSGQYTHEFDGDEQFYVDLERKETAWRWPEFSKFGGFDPQGALRNMAV |
| | AKHNLNIMIKRYNSTAATNEVPEVTVFSKSPVTLGQPNTLICLVDNIFPPVVNITWLSNGQSVTEGVS |
| | ETSFLSKSDHSFFKISYLTFLPSADEIYDCKVEHWGLDQPLLKHWEPEIPAPMSELTET |
| | (HLA-DQA1*01:02 soluble) |
| 116 | GRDSPEDFVFQFKGMCYFTNGTERVRLVTRYIYNREEYARFDSDVGVYRAVTPQGRPDAEYWNSQKEV |
| | LEGTRAELDTVCRHNYEVAFRGILQRRVEPTVTISPSRTEALNHHNLLVCSVTDFYPGQIKVRWFRND |
| | QEETAGVVSTPLIRNGDWTFQILVMLEMTPQRGDVYTCHVEHPSLQSPITVEWRAQSESAQSK |
| | (HLA-DQB1*06:02 soluble) |
| 117 | EDIVADHVASYGVNLYQSYGPSGQYSHEFDGDEEFYVDLERKETVWQLPLFRRFRRFDPQFALTNIAV |
| | LKHNLNIVIKRSNSTAATNEVPEVTVFSKSPVTLGQPNTLICLVDNIFPPVVNITWLSNGHSVTEGVS |
| | ETSFLSKSDHSFFKISYLTFLPSADEIYDCKVEHWGLDEPLLKHWEPEIPTPMSELTET |
| | (HLA-DQA1*03:01 soluble) |
| 118 | GRDSPEDFVYQFKGMCYFTNGTERVRLVTRYIYNREEYARFDSDVGVYRAVTPLGPPAAEYWNSQKEV |
| | LERTRAELDTVCRHNYQLELRTTLQRRVEPTVTISPSRTEALNHHNLLVCSVTDFYPAQIKVRWFRND |
| | QEETTGVVSTPLIRNGDWTFQILVMLEMTPQRGDVYTCHVEHPSLQNPIIVEWRAQSESAQSK |
| | (HLA-DQB1*03:02 soluble) |
| 119 | EDIVADHVASYGVNLYQSYGPSGQYTHEFDGDEQFYVDLGRKETVWCLPVLRQFRFDPQFALTNIAVL |
| | KHNLNSLIKRSNSTAATNEVPEVTVFSKSPVTLGQPNILICLVDNIFPPVVNITWLSNGHSVTEGVSE |
| | TSFLSKSDHSFFKISYLTLLPSAEESYDCKVEHWGLDKPLLKHWEPEIPAPMSELTET |
| | (HLA-DQA1*05:01 soluble) |
| 120 | GRDSPEDFVYQFKGMCYFTNGTERVRLVSRSIYNREEIVRFDSDVGEFRAVTLLGLPAAEYWNSQKDI |
| | LERKRAAVDRVCRHNYQLELRTTLQRRVEPTVTISPSRTEALNHHNLLVCSVTDFYPAQIKVRWFRND |
| | QEETAGVVSTPLIRNGDWTFQILVMLEMTPQRGDVYTCHVEHPSLQSPITVEWRAQSESAQSK |
| | (HLA-DQB1*02:01 soluble) |
| 121 | GRDSPEDFVYQFKAMCYFTNGTERVRYVTRYIYNREEYARFDSDVEVYRAVTPLGPPDAEYWNSQKEV |
| | LERTRAELDTVCRHNYQLELRTTLQRRVEPTVTISPSRTEALNHHNLLVCSVTDFYPAQIKVRWFRND |
| | QEETTGVVSTPLIRNGDWTFQILVMLEMTPQHGDVYTCHVEHPSLQNPITVEWRAQSESAQSK |
| | (HLA-DQB1*03:01 soluble) |
| 122 | GRDSPEDFVYQFKGMCYFTNGTERVRLVTRYIYNREEYARFDSDVGVYRAVTPLGPPDAEYWNSQKEV |
| | LERTRAELDTVCRHNYQLELRTTLQRRVEPTVTISPSRTEALNHHNLLVCSVTDFYPAQIKVRWFRND |
| | QEETTGVVSTPLIRNGDWTFQILVMLEMTPQRGDVYTCHVEHPSLQNPIIVEWRAQSESAQSK |
| | (HLA-DQB1*03:03 soluble) |
| 123 | GRDSPEDFVFQFKGMCYFTNGTERVRGVTRYIYNREEYARFDSDVGVYRAVTPLGRLDAEYWNSQKDI |
| | LEEDRASVDTVCRHNYQLELRTTLQRRVEPTVTISPSRTEALNHHNLLVCSVTDFYPAQIKVRWFRND |
| | QEETTGVVSTPLIRNGDWTFQILVMLEMTPQRGDVYTCHVEHPSLQNPIIVEWRAQSESAQSK |
| | (HLA-DQB1*04:02 soluble) |
| 124 | GRDSPEDFVYQFKGLCYFTNGTERVRGVTRHIYNREEYVRFDSDVGVYRAVTPQGRPDAEYWNSQKEV |
| | LEGARASVDRVCRHNYEVAYRGILQRRVEPTVTISPSRTEALNHHNLLICSVTDFYPSQIKVRWFRND |
| | QEETAGVVSTPLIRNGDWTFQILVMLEMTPQRGDVYTCHVEHPSLQSPITVEWRAQSESAQSK |
| | (HLA-DQB1*05:03 soluble) |
| 125 | GRDSPEDFVYQFKGMCYFTNGTERVRLVTRHIYNREEYARFDSDVGVYRAVTPQGRPDAEYWNSQKEV |
| | LEGTRAELDTVCRHNYEVAFRGILQRRVEPTVTISPSRTEALNHHNLLVCSVTDFYPGQIKVRWFRND |
| | QEETAGVVSTPLIRNGDWTFQILVMLEMTPQRGDVYTCHVEHPSLQSPITVEWRAQSESAQSK |
| | (HLA-DQB1*06:03 soluble) |
| 126 | GRDSPEDFVYQFKGMCYFTNGTERVRLVTRHIYNREEYARFDSDVGVYRAVTPQGRPVAEYWNSQKEV |
| | LERTRAELDTVCRHNYEVGYRGILQRRVEPTVTISPSRTEALNHHNLLVCSVTDFYPGQIKVQWFRND |
| | QEETAGVVSTPLIRNGDWTFQILVMLEMTPQRGDVYTCHVEHPSLQSPITVEWRAQSESAQSK |
| | (HLA-DQB1*06:04 soluble) |
| 127 | IAELPPKVSVFVPPRDGFFGNPRKSKLICQATGFSPRQIQVSWLREGKQVGSGVTTDQVQAEAKESGP |
| | TTYKVTSTLTIKESDWLGQSMFTCRVDHRGLTFQQNASSMCVPDQDTAIRVFAIPPSFASIFLTKSTK |
| | LTCLVTDLTTYDSVTISWTRQNGEAVKTHTNISESHPNATFSAVGEASICEDDWNSGERFTCTVTHTD |
| | LPSPLKQTISRPKGVALHRPDVYLLPPAREQLNLRESATITCLVTGFSPADVFVQWMQRGQPLSPEKY |
| | VTSAPMPEPQAPGRYFAHSILTVSEEEWNTGETYTCVVAHEALPNRVTERTVDKSTGKPTLYNVSLVM |
| | SDTAGTCY |
| | (IgM Cm2-Cm3-Cm4-TP) |
| 128 | IRVFAIPPSFASIFLTKSTKLTCLVTDLTTYDSVTISWTRQNGEAVKTHTNISESHPNATFSAVGEAS |
| | ICEDDWNSGERFTCTVTHTDLPSPLKQTISRPKGVALHRPDVYLLPPAREQLNLRESATITCLVTGFS |
| | PADVFVQWMQRGQPLSPEKYVTSAPMPEPQAPGRYFAHSILTVSEEEWNTGETYTCVVAHEALPNRVT |
| | ERTVDKSTGKPTLYNVSLVMSDTAGTCY |
| | (IgM Cm3-Cm4-TP) |
| 129 | PTLYNVSLVMSDTAGTCY |
| | (human IgM tailpiece) |
| 130 | PTHVNVSVVMAEVDGTCY |
| | (human IgA tailpiece) |
| 131 | GGGGSGGGGSGGGGS |
| | (Linker) |
| 132 | GSAPKPAPKPAPAPKPAPKPAP |
| | (linker) |
| 133 | GGGGSGGGGSGGGGSGGGGSAPKPAPKPAPAPKPAPKPAP |
| | (linker) |
| 134 | (GGGGS)n, wherein n = 1-6 |
| | (linker) |
| 135 | SSSSGSSSSGSAA |
| | (linker) |
| 136 | GGGGG |
| | (linker) |
| 137 | S(GGGGS)n, wherein n = 1-10 |
| | (linker) |
| 138 | (GGSG)n, wherein n = 1-5 |
| | (linker) |
| 139 | GSAT |
| | (linker) |
| 140 | (GGSGGS)n, wherein n = 1-5 |
| | (linker) |
| 141 | GGGGGGGGSGGGGSGGGGS |
| | ((G4S) 4 linker) |
| 142 | GSGSAGGSGSGGGS |
| | ((GS) 2AG2SGSG3S linker) |
| 143 | DYKDDDDK |
| | (FLAG Tag) |
| 144 | HHHHHH |
| | (His6 Tag) |
| 145 | GKPIPNPLLGLDST |
| | (V5 Tag) |
| 146 | WSHPQFEK |
| | (strep-tag) |
| 147 | EDQVDPRLIDGK |
| | (protein C tag) |
| 148 | EQKLISEEDL |
| | (Myc tag) |
| 149 | GLNDIFEAQKIEWHEGSGEQKLISEEDL |
| | (avitag-Myc (biotin-mediated)) |
| 150 | GLNDIFEAQKIEWHEGSGEQKLISEEDLHHHHHH |
| | (avitag-Myc-His (biotin-mediated)) |
| 151 | GSGSAGGGLNDIFEAQKIEWHEGSTGHHHHHHDYKDDDDK |
| | (Avitag sequence with His6 tag and Flag tag) |
| 152 | LTDTLQAETDQLEDEKSALQTEIANLLKEKEKLEFILAA |
| | (Fos) |
| 153 | RIARLEEKVKTLKAQNSELASTANMLREQVAQLKQKVMNH |
| | (Jun) |
| 154 | TTAPSAQLEKELQALQKENAQLEWELQALEKELAQ |
| | (acidic leucine zipper) |
| 155 | TTAPSAQLKKKLQALKKKNAQLKWKLQALKKKLAQ |
| | (basic leucine zipper) |
| 156 | EPKSADKTHTCPPCPAPEAAGGPSVFLFPPKPKDTLMISRTPEVTCVVVDVSHEDPEVKFNWYVDGVE |
| | VHNAKTKPREEQYNSTYRVVSVLTVLHQDWLNGKEYKCKVSNKALGAPIEKTISKAKGQPREPQVYTL |
| | PPCRDELTKNQVSLWCLVKGFYPSDIAVEWESNGQPENNYKTTPPVLDSDGSFFLYSKLTVDKSRWQQ |
| | GNVFSCSVMHEALHNHYTQKSLSLSPGK |
| | (knob (knob-in-hole)) |
| 157 | EPKSADKTHTCPPCPAPEAAGGPSVFLFPPKPKDTLMISRTPEVTCVVVDVSHEDPEVKFNWYVDGVE |
| | VHNAKTKPREEQYNSTYRVVSVLTVLHQDWLNGKEYKCKVSNKALGAPIEKTISKAKGQPREPQVCTL |
| | PPSRDELTKNQVSLSCAVKGFYPSDIAVEWESNGQPENNYKTTPPVLDSDGSFFLVSKLTVDKSRWQQ |
| | GNVFSCSVMHEALHNHYTQKSLSLSPGK |
| | (hole (knob-in-hole)) |
| 158 | RGVPHIVMVDAYKRYK |
| | (spytag) |
| 159 | VTTLSGLSGEQGPSGDMTTEEDSATHIKFSKRDEDGRELAGATMELRDSSGKTISTWISDGHVKDFYL |
| | YPGKYTFVETAAPDGYEVATPIEFTVNEDGQVTVDGEATEGDAHT |
| | (spycatcher) |
| 160 | YMLDLQPETT |
| | (HPV sequence) |
| 161 | SLPITVYYA |
| | (HSV sequence) |
| 162 | RMFPNAPYL |
| | (WT-1 sequence) |
| 163 | KILGFVFTV |
| | (HLA-A2-binding peptide) |
| 164 | GILGFVFTL |
| | (HLA-A2-binding peptide) |
| 165 | VTEHDTLLY |
| | (A1:01-binding peptide) |
| 166 | TVRSHCVSK |
| | (A3:01-binding peptide) |
| 167 | TTFLQTMLR |
| | (A11:01-binding peptide) |
| 168 | RYPLTFGWCF |
| | (A24:02-binding peptide) |
| 169 | RPHERNGFTVL |
| | (B7:02-binding peptide) |
| 170 | IPSINVHHY |
| | (B35:01-binding peptide) |
| 171 | FVYGGSKTSL |
| | (C3:04-binding peptide) |
| 172 | FLRGRAYGL |
| | (B8:01-binding peptide) |
| 173 | RYRPGTVAL |
| | (C7:02-binding peptide) |
| 174 | QYDPVAALF |
| | (C4:01-binding peptide) |
| 175 | GQFLTPNSH |
| | (B15:01-binding peptide) |
| 176 | KEVNSQLSL |
| | (B40:01-binding peptide) |
| 177 | VSFIEFVGW |
| | (B58:01-binding peptide) |
| 178 | IAPWYAFAL |
| | (C8:02-binding peptide) |
| 179 | DXEXNPGP, where X = any amino acid |
| | (2A core sequence motif) |
| 180 | EGRGSLLTCGDVEENPGP |
| | (T2A sequence) |
| 181 | ATNFSLLKQAGDVEENPGP |
| | (P2A sequence) |
| 182 | QCTNYALLKLAGDVESNPGP |
| | (E2A sequence) |
| 183 | VKQTLNFDLLKLAGDVESNPGP |
| | (F2A sequence) |
| 184 | MEAPAQLLFLLLLWLPDTTG |
| | (Ig Kappa chain V-III region CLL signal peptide) |
| 185 | MNRGVPFRHLLLVLQLALLPAAT |
| | (signal peptide of human CD4 signal peptide) |
| 186 | METDTLLLWVLLLWVPGSTG |
| | (mouse Ig kappa chain V-III region signal peptide) |
| 187 | MVPCTLLLLLAAALAPTQTRA |
| | (mouse H-2Kb signal peptide) |
| 188 | MKWVTFISLLFLFSSAYS |
| | (human serum albumin signal peptide) |
| 189 | MYRMQLLSCIALSLALVINS |
| | (human IL-2 signal peptide) |
| 190 | MAVMAPRTLLLLLSGALALTQTWA |
| | (human HLA-A*02:01 signal peptide) |
| 191 | MSRSVALAVLALLSLSGLEA |
| | (Human b2m signal peptide) |
| 192 | LPETGG |
| | (sortase recognition site) |
| 193 | IAELPPKVSVFVPPRDGFFGNPRKSKLICQATGFSPRQIQVSWLREGKQVGSGVTTDQVQAEAKESGP |
| | TTYKVTSTLTIKESDWLGQSMFTCRVDHRGLTFQQNASSMCVPDQDTAIRVFAIPPSFASIFLTKSTK |
| | LTCLVTDLTTYDSVTISWTRQNGEAVKTHTNISESHPNATFSAVGEASICEDDWNSGERFTCTVTHTD |
| | DPSPLKQTISRPKGVALHRPDVYLLPPAREQLNLRESATITCLVTGFSPADVFVQWMQRGQPLSPEKY |
| | VTSAPMPEPQAPGRYFAHSILTVSEEEWNTGETYTCVVAHEALPNRVTERTVDKSTGKPTLYNVSLVM |
| | SDTAGTCY |
| | (IgM Cm2-Cm3-Cm4-TP L310D) |
| 194 | IRVFAIPPSFASIFLTKSTKLTCLVTDLTTYDSVTISWTRQNGEAVKTHTNISESHPNATFSAVGEAS |
| | ICEDDWNSGERFTCTVTHTDDPSPLKQTISRPKGVALHRPDVYLLPPAREQLNLRESATITCLVTGFS |
| | PADVFVQWMQRGQPLSPEKYVTSAPMPEPQAPGRYFAHSILTVSEEEWNTGETYTCVVAHEALPNRVT |
| | ERTVDKSTGKPTLYNVSLVMSDTAGTCY |
| | (IgM Cm3-Cm4-TP L310D) |
| 195 | IAELPPKVSVFVPPRDGFFGNPRKSKLICQATGFSPRQIQVSWLREGKQVGSGVTTDQVQAEAKESGP |
| | TTYKVTSTLTIKESDWLGQSMFTCRVDHRGLTFQQNASSMCVPDQDTAIRVFAIPPSFASIFLTKSTK |
| | LTCLVTDLTTYDSVTISWTRQNGEAVKTHTNISESHPNATFSAVGEASICEDDWNSGERFTCTVTHTD |
| | LASSLKQTISRPKGVALHRPDVYLLPPAREQLNLRESATITCLVTGFSPADVFVQWMQRGQPLSPEKY |
| | VTSAPMPEPQAPGRYFAHSILTVSEEEWNTGETYTCVVAHEALPNRVTERTVDKSTGKPTLYNVSLVM |
| | SDTAGTCY |
| | (IgM Cm2-Cm3-Cm4-TP P311A, P313S) |
| 196 | IRVFAIPPSFASIFLTKSTKLTCLVTDLTTYDSVTISWTRQNGEAVKTHTNISESHPNATFSAVGEAS |
| | ICEDDWNSGERFTCTVTHTDLASSLKQTISRPKGVALHRPDVYLLPPAREQLNLRESATITCLVTGFS |
| | PADVFVQWMQRGQPLSPEKYVTSAPMPEPQAPGRYFAHSILTVSEEEWNTGETYTCVVAHEALPNRVT |
| | ERTVDKSTGKPTLYNVSLVMSDTAGTCY |
| | (IgM Cm3-Cm4-TP P311A, P313S) |
| 197 | IAELPPKVSVFVPPRDGFFGNPRKSKLICQATGFSPRQIQVSWLREGKQVGSGVTTDQVQAEAKESGP |
| | TTYKVTSTLTIKESDWLGQSMFTCRVDHRGLTFQQNASSMCVPDQDTAIRVFAIPPSFASIFLTKSTK |
| | LTCLVTDLTTYDSVTISWTRQNGEAVKTHTNISESHPNATFSAVGEASICEDDWNSGERFTCTVTHTD |
| | LGSPLKQTISRPKGVALHRPDVYLLPPAREQLNLRESATITCLVTGFSPADVFVQWMQRGQPLSPEKY |
| | VTSAPMPEPQAPGRYFAHSILTVSEEEWNTGETYTCVVAHEALPNRVTERTVDKSTGKPTLYNVSLVM |
| | SDTAGTCY |
| | (IgM Cm2-Cm3-Cm4-TP P311G) |
| 198 | IRVFAIPPSFASIFLTKSTKLTCLVTDLTTYDSVTISWTRQNGEAVKTHTNISESHPNATFSAVGEAS |
| | ICEDDWNSGERFTCTVTHTDLGSPLKQTISRPKGVALHRPDVYLLPPAREQLNLRESATITCLVTGFS |
| | PADVFVQWMQRGQPLSPEKYVTSAPMPEPQAPGRYFAHSILTVSEEEWNTGETYTCVVAHEALPNRVT |
| | ERTVDKSTGKPTLYNVSLVMSDTAGTCY |
| | (IgM Cm3-Cm4-TP P311G) |
| 199 | ELAGIGILTVGGGGSGGGGSGGGGSIQRTPKIQVYSRHPAENGKSNFLNCYVSGFHPSDIEVDLLKNG |
| | ERIEKVEHSDLSFSKDWSFYLLYYTEFTPTEKDEYACRVNHVTLSQPKIVKWDRDMGGGGSGGGGSGG |
| | GGSGGGGSGSHSMRYFFTSVSRPGRGEPRFIAVGYVDDTQFVRFDSDAASQRMEPRAPWIEQEGPEYW |
| | DGETRKVKAHSQTHRVDLGTLRGAYNQSEAGSHTVQRMYGCDVGSDWRFLRGYHQYAYDGKDYIALKE |
| | DLRSWTAADMAAQTTKHKWEAAHVAEQLRAYLEGTCVEWLRRYLENGKETLQRTDAPKTHMTHHAVSD |
| | HEATLRCWALSFYPAEITLTWQRDGEDQTQDTELVETRPAGDGTFQKWAAVVVPSGQEQRYTCHVQHE |
| | GLPKPLTLRWEPSSGGGGSGGGGSGGGGSIAELPPKVSVFVPPRDGFFGNPRKSKLICQATGFSPRQI |
| | QVSWLREGKQVGSGVTTDQVQAEAKESGPTTYKVTSTLTIKESDWLGQSMFTCRVDHRGLTFQQNASS |
| | MCVPDQDTAIRVFAIPPSFASIFLTKSTKLTCLVTDLTTYDSVTISWTRQNGEAVKTHTNISESHPNA |
| | TFSAVGEASICEDDWNSGERFTCTVTHTDDPSPLKQTISRPKGVALHRPDVYLLPPAREQLNLRESAT |
| | ITCLVTGFSPADVFVQWMQRGQPLSPEKYVTSAPMPEPQAPGRYFAHSILTVSEEEWNTGETYTCVVA |
| | HEALPNRVTERTVDKSTGKPTLYNVSLVMSDTAGTCY |
| | (ELA_B2M_HLAA2_gM2-4 L310D) |
| 200 | ELAGIGILTVGGGGSGGGGSGGGGSIQRTPKIQVYSRHPAENGKSNFLNCYVSGFHPSDIEVDLLKNG |
| | ERIEKVEHSDLSFSKDWSFYLLYYTEFTPTEKDEYACRVNHVTLSQPKIVKWDRDMGGGGSGGGGSGG |
| | GGSGGGGSGSHSMRYFFTSVSRPGRGEPRFIAVGYVDDTQFVRFDSDAASQRMEPRAPWIEQEGPEYW |
| | DGETRKVKAHSQTHRVDLGTLRGAYNQSEAGSHTVQRMYGCDVGSDWRFLRGYHQYAYDGKDYIALKE |
| | DLRSWTAADMAAQTTKHKWEAAHVAEQLRAYLEGTCVEWLRRYLENGKETLQRTDAPKTHMTHHAVSD |
| | HEATLRCWALSFYPAEITLTWQRDGEDQTQDTELVETRPAGDGTFQKWAAVVVPSGQEQRYTCHVQHE |
| | GLPKPLTLRWEPSSGGGGSGGGGSGGGGSIRVFAIPPSFASIFLTKSTKLTCLVTDLTTYDSVTISWT |
| | RQNGEAVKTHTNISESHPNATFSAVGEASICEDDWNSGERFTCTVTHTDDPSPLKQTISRPKGVALHR |
| | PDVYLLPPAREQLNLRESATITCLVTGFSPADVFVQWMQRGQPLSPEKYVTSAPMPEPQAPGRYFAHS |
| | ILTVSEEEWNTGETYTCVVAHEALPNRVTERTVDKSTGKPTLYNVSLVMSDTAGTCY |
| | (ELA_B2M_HLAA2_IgM Cm3-Cm4-TP L310D) |
| 201 | ELAGIGILTVGGGGSGGGGSGGGGSIQRTPKIQVYSRHPAENGKSNFLNCYVSGFHPSDIEVDLLKNG |
| | ERIEKVEHSDLSFSKDWSFYLLYYTEFTPTEKDEYACRVNHVTLSQPKIVKWDRDMGGGGSGGGGSGG |
| | GGSGGGGSGSHSMRYFFTSVSRPGRGEPRFIAVGYVDDTQFVRFDSDAASQRMEPRAPWIEQEGPEYW |
| | DGETRKVKAHSQTHRVDLGTLRGAYNQSEAGSHTVQRMYGCDVGSDWRFLRGYHQYAYDGKDYIALKE |
| | DLRSWTAADMAAQTTKHKWEAAHVAEQLRAYLEGTCVEWLRRYLENGKETLQRTDAPKTHMTHHAVSD |
| | HEATLRCWALSFYPAEITLTWQRDGEDQTQDTELVETRPAGDGTFQKWAAVVVPSGQEQRYTCHVQHE |
| | GLPKPLTLRWEPSSGGGGSGGGGSGGGGSIAELPPKVSVFVPPRDGFFGNPRKSKLICQATGFSPRQI |
| | QVSWLREGKQVGSGVTTDQVQAEAKESGPTTYKVTSTLTIKESDWLGQDMFTCRVDHRGLTFQQNASS |
| | MCVPDQDTAIRVFAIPPSFASIFLTKSTKLTCLVTDLTTYDSVTISWTRQNGEAVKTHTNISESHPNA |
| | TFSAVGEASICEDDWNSGERFTCTVTHTDLASSLKQTISRPKGVALHRPDVYLLPPAREQLNLRESAT |
| | ITCLVTGFSPADVFVQWMQRGQPLSPEKYVTSAPMPEPQAPGRYFAHSILTVSEEEWNTGETYTCVVA |
| | HEALPNRVTERTVDKSTGKPTLYNVSLVMSDTAGTCY |
| | (ELA_B2M_HLAA2_gM2-4 Cm2-Cm3-Cm4-TP P311A, P313S) |
| 202 | ELAGIGILTVGGGGSGGGGSGGGGSIQRTPKIQVYSRHPAENGKSNFLNCYVSGFHPSDIEVDLLKNG |
| | ERIEKVEHSDLSFSKDWSFYLLYYTEFTPTEKDEYACRVNHVTLSQPKIVKWDRDMGGGGSGGGGSGG |
| | GGSGGGGSGSHSMRYFFTSVSRPGRGEPRFIAVGYVDDTQFVRFDSDAASQRMEPRAPWIEQEGPEYW |
| | DGETRKVKAHSQTHRVDLGTLRGAYNQSEAGSHTVQRMYGCDVGSDWRFLRGYHQYAYDGKDYIALKE |
| | DLRSWTAADMAAQTTKHKWEAAHVAEQLRAYLEGTCVEWLRRYLENGKETLQRTDAPKTHMTHHAVSD |
| | HEATLRCWALSFYPAEITLTWQRDGEDQTQDTELVETRPAGDGTFQKWAAVVVPSGQEQRYTCHVQHE |
| | GLPKPLTLRWEPSSGGGGSGGGGSGGGGSIRVFAIPPSFASIFLTKSTKLTCLVTDLTTYDSVTISWT |
| | RQNGEAVKTHTNISESHPNATFSAVGEASICEDDWNSGERFTCTVTHTDLASSLKQTISRPKGVALHR |
| | PDVYLLPPAREQLNLRESATITCLVTGFSPADVFVQWMQRGQPLSPEKYVTSAPMPEPQAPGRYFAHS |
| | ILTVSEEEWNTGETYTCVVAHEALPNRVTERTVDKSTGKPTLYNVSLVMSDTAGTCY |
| | (ELA_B2M_HLAA2_gM2-4 Cm3-Cm4-TP P311A, P313S) |
| 203 | ELAGIGILTVGGGGSGGGGSGGGGSIQRTPKIQVYSRHPAENGKSNFLNCYVSGFHPSDIEVDLLKNG |
| | ERIEKVEHSDLSFSKDWSFYLLYYTEFTPTEKDEYACRVNHVTLSQPKIVKWDRDMGGGGSGGGGSGG |
| | GGSGGGGSGSHSMRYFFTSVSRPGRGEPRFIAVGYVDDTQFVRFDSDAASQRMEPRAPWIEQEGPEYW |
| | DGETRKVKAHSQTHRVDLGTLRGAYNQSEAGSHTVQRMYGCDVGSDWRFLRGYHQYAYDGKDYIALKE |
| | DLRSWTAADMAAQTTKHKWEAAHVAEQLRAYLEGTCVEWLRRYLENGKETLQRTDAPKTHMTHHAVSD |
| | HEATLRCWALSFYPAEITLTWQRDGEDQTQDTELVETRPAGDGTFQKWAAVVVPSGQEQRYTCHVQHE |
| | GLPKPLTLRWEPSSGGGGSGGGGSGGGGSIAELPPKVSVFVPPRDGFFGNPRKSKLICQATGFSPRQI |
| | QVSWLREGKQVGSGVTTDQVQAEAKESGPTTYKVTSTLTIKESDWLGQSMFTCRVDHRGLTFQQNASS |
| | MCVPDQDTAIRVFAIPPSFASIFLTKSTKLTCLVTDLTTYDSVTISWTRQNGEAVKTHTNISESHPNA |
| | TFSAVGEASICEDDWNSGERFTCTVTHTDLGSPLKQTISRPKGVALHRPDVYLLPPAREQLNLRESAT |
| | ITCLVTGFSPADVFVQWMQRGQPLSPEKYVTSAPMPEPQAPGRYFAHSILTVSEEEWNTGETYTCVVA |
| | HEALPNRVTERTVDKSTGKPTLYNVSLVMSDTAGTCY |
| | (ELA_B2M_HLAA2 IgM Cm2-Cm3-Cm4-TP P311G) |
| 204 | ELAGIGILTVGGGGSGGGGSGGGGSIQRTPKIQVYSRHPAENGKSNFLNCYVSGFHPSDIEVDLLKNG |
| | ERIEKVEHSDLSFSKDWSFYLLYYTEFTPTEKDEYACRVNHVTLSQPKIVKWDRDMGGGGSGGGGSGG |
| | GGSGGGGSGSHSMRYFFTSVSRPGRGEPRFIAVGYVDDTQFVRFDSDAASQRMEPRAPWIEQEGPEYW |
| | DGETRKVKAHSQTHRVDLGTLRGAYNQSEAGSHTVQRMYGCDVGSDWRFLRGYHQYAYDGKDYIALKE |
| | DLRSWTAADMAAQTTKHKWEAAHVAEQLRAYLEGTCVEWLRRYLENGKETLQRTDAPKTHMTHHAVSD |
| | HEATLRCWALSFYPAEITLTWQRDGEDQTQDTELVETRPAGDGTFQKWAAVVVPSGQEQRYTCHVQHE |
| | GLPKPLTLRWEPSSGGGGSGGGGSGGGGSIRVFAIPPSFASIFLTKSTKLTCLVTDLTTYDSVTISWT |
| | RQNGEAVKTHTNISESHPNATFSAVGEASICEDDWNSGERFTCTVTHTDLGSPLKQTISRPKGVALHR |
| | PDVYLLPPAREQLNLRESATITCLVTGFSPADVFVQWMQRGQPLSPEKYVTSAPMPEPQAPGRYFAHS |
| | ILTVSEEEWNTGETYTCVVAHEALPNRVTERTVDKSTGKPTLYNVSLVMSDTAGTCY |
| | (ELA_B2M_HLAA2 IgM Cm3-Cm4-TP P311G) |
| 205 | IKEEHVIIQAEFYLNPDQSGEFMFDFDGDEIFHVDMAKKETVWRLEEFGRFASFEAQGALANIAVDKA |
| | NLEIMTKRSNYTPITNVPPEVTVLTNSPVELREPNVLICFIDKFTPPVVNVTWLRNGKPVTTGVSETV |
| | FLPRFDHLFRKFHYLPFLPSTEDVYDCRVEHWGLDEPLLKHWEFDAPSPLPETTEGGGGSGGGGSIAR |
| | LEEKVKTLKAQNYELASTANMLREQVAQLGAPGSGSGSEQKLISEEDL |
| | (DRA1*01-Linker-Jun-Linker-Myc) |
| 206 | IKEEHVIIQAEFYLNPDQSGEFMFDFDGDEIFHVDMAKKETVWRLEEFGRFASFEAQGALANIAVDKA |
| | NLEIMTKRSNYTPITNVPPEVTVLTNSPVELREPNVLICFIDKFTPPVVNVTWLRNGKPVTTGVSETV |
| | FLPRFDHLFRKFHYLPFLPSTEDVYDCRVEHWGLDEPLLKHWEFDAPSPLPETTEGSEQKLISEEDL |
| | (DRA1*01-Linker-Myc) |
| 207 | MSQIMYNYPAMMAHAGGGGSGGGGSGSGDTRPRFLWQPKRECHFFNGTERVRFLDRYFYNQEESVRFD |
| | SDVGEFRAVTELGRPDAEYWNSQKDILEQARAAVDTYCRHNYGVVESFTVQRRVQPKVTVYPSKTQPL |
| | QHHNLLVCSVSGFYPGSIEVRWFLNGQEEKAGMVSTGLIQNGDWTFQTLVMLETVPRSGEVYTCQVEH |
| | PSVTSPLTVEWRARSESAQSKGGGGSGGGGSLDELQAEIEQLEERNYALRKEIEDLQKQLEKLGAPGG |
| | GGSGIAELPPKVSVFVPPRDGFFGNPRKSKLICQATGFSPRQIQVSWLREGKQVGSGVTTDQVQAEAK |
| | ESGPTTYKVTSTLTIKESDWLGQSMFTCRVDHRGLTFQQNASSMCVPDQDTAIRVFAIPPSFASIFLT |
| | KSTKLTCLVTDLTTYDSVTISWTRQNGEAVKTHTNISESHPNATFSAVGEASICEDDWNSGERFTCTV |
| | THTDLPSPLKQTISRPKGVALHRPDVYLLPPAREQLNLRESATITCLVTGFSPADVFVQWMQRGQPLS |
| | PEKYVTSAPMPEPQAPGRYFAHSILTVSEEEWNTGETYTCVVAHEALPNRVTERTVDKSTGKPTLYNV |
| | SLVMSDTAGTCY |
| | (MTB-linker-DRB1*15:01-Linker-FosW-Linker-IgMCm2-4) |
| 208 | ENPVVHFFKNIVTPGGGGSGGGGSGSGDTRPRFLWQPKRECHFFNGTERVRFLDRYFYNQEESVRFDS |
| | DVGEFRAVTELGRPDAEYWNSQKDILEQARAAVDTYCRHNYGVVESFTVQRRVQPKVTVYPSKTQPLQ |
| | HHNLLVCSVSGFYPGSIEVRWFLNGQEEKAGMVSTGLIQNGDWTFQTLVMLETVPRSGEVYTCQVEHP |
| | SVTSPLTVEWRARSESAQSKGGGGSGGGGSLDELQAEIEQLEERNYALRKEIEDLQKQLEKLGAPGGG |
| | GSGIAELPPKVSVFVPPRDGFFGNPRKSKLICQATGFSPRQIQVSWLREGKQVGSGVTTDQVQAEAKE |
| | SGPTTYKVTSTLTIKESDWLGQSMFTCRVDHRGLTFQQNASSMCVPDQDTAIRVFAIPPSFASIFLTK |
| | STKLTCLVTDLTTYDSVTISWTRQNGEAVKTHTNISESHPNATFSAVGEASICEDDWNSGERFTCTVT |
| | HTDLPSPLKQTISRPKGVALHRPDVYLLPPAREQLNLRESATITCLVTGFSPADVFVQWMQRGQPLSP |
| | EKYVTSAPMPEPQAPGRYFAHSILTVSEEEWNTGETYTCVVAHEALPNRVTERTVDKSTGKPTLYNVS |
| | LVMSDTAGTCY |
| | (MBP-Linker-DRB1*15:01-Linker-FosW-Linker-IgMCm2-4) |
| 209 | RFYKTLRAEQASQGSGGGGSGGGGSGDTRPRFLWQPKRECHFFNGTERVRFLDRYFYNQEESVRFDSD |
| | VGEFRAVTELGRPDAEYWNSQKDILEQARAAVDTYCRHNYGVGESFTVQRRVQPKVTVYPSKTQPLQH |
| | HNLLVCSVSGFYPGSIEVRWFLNGQEEKAGMVSTGLIQNGDWTFQTLVMLETVPRSGEVYTCQVEHPS |
| | VTSPLTVEWRARSESAQSKGGGGSGGGGSLDELQAEIEQLEERNYALRKEIEDLQKQLEKLGAPGSGS |
| | IAELPPKVSVFVPPRDGFFGNPRKSKLICQATGFSPRQIQVSWLREGKQVGSGVTTDQVQAEAKESGP |
| | TTYKVTSTLTIKESDWLGQSMFTCRVDHRGLTFQQNASSMCVPDQDTAIRVFAIPPSFASIFLTKSTK |
| | LTCLVTDLTTYDSVTISWTRQNGEAVKTHTNISESHPNATFSAVGEASICEDDWNSGERFTCTVTHTD |
| | LPSPLKQTISRPKGVALHRPDVYLLPPAREQLNLRESATITCLVTGFSPADVFVQWMQRGQPLSPEKY |
| | VTSAPMPEPQAPGRYFAHSILTVSEEEWNTGETYTCVVAHEALPNRVTERTVDKSTGKPTLYNVSLVM |
| | SDTAGTCY |
| | (HIV GAG RQ13-Linker-DRB1*15:02-Linker-FosW-Linker- IgMCm2-4) |
| 210 | FRDYVDRFYKTLRAEQASQEGGGGSIEGRGSGGGSGDTRPRFLWQPKRECHFFNGTERVRFLDRYFYN |
| | QEESVRFDSDVGEFRAVTELGRPDAEYWNSQKDILEQARAAVDTYCRHNYGVGESFTVQRRVQPKVTV |
| | YPSKTQPLQHHNLLVCSVSGFYPGSIEVRWFLNGQEEKAGMVSTGLIQNGDWTFQTLVMLETVPRSGE |
| | VYTCQVEHPSVTSPLTVEWRARSESAQSKGGGGSGGGGSGSIAELPPKVSVFVPPRDGFFGNPRKSKL |
| | ICQATGFSPRQIQVSWLREGKQVGSGVTTDQVQAEAKESGPTTYKVTSTLTIKESDWLGQSMFTCRVD |
| | HRGLTFQQNASSMCVPDQDTAIRVFAIPPSFASIFLTKSTKLTCLVTDLTTYDSVTISWTRQNGEAVK |
| | THTNISESHPNATFSAVGEASICEDDWNSGERFTCTVTHTDLPSPLKQTISRPKGVALHRPDVYLLPP |
| | AREQLNLRESATITCLVTGFSPADVFVQWMQRGQPLSPEKYVTSAPMPEPQAPGRYFAHSILTVSEEE |
| | WNTGETYTCVVAHEALPNRVTERTVDKSTGKPTLYNVSLVMSDTAGTCY |
| | (HIV GAG-LinkerXa-DRB1*15:02-Linker-IgMCm2-4) |
| 211 | FRDYVDRFYKTLRAEQASQEGSGGGGSGGGGSGDTRPRFLWQPKRECHFFNGTERVRFLDRYFYNQEE |
| | SVRFDSDVGEFRAVTELGRPDAEYWNSQKDILEQARAAVDTYCRHNYGVGESFTVQRRVQPKVTVYPS |
| | KTQPLQHHNLLVCSVSGFYPGSIEVRWFLNGQEEKAGMVSTGLIQNGDWTFQTLVMLETVPRSGEVYT |
| | CQVEHPSVTSPLTVEWRARSESAQSKGGGGSGGGGSGSIAELPPKVSVFVPPRDGFFGNPRKSKLICQ |
| | ATGFSPRQIQVSWLREGKQVGSGVTTDQVQAEAKESGPTTYKVTSTLTIKESDWLGQSMFTCRVDHRG |
| | LTFQQNASSMCVPDQDTAIRVFAIPPSFASIFLTKSTKLTCLVTDLTTYDSVTISWTRQNGEAVKTHT |
| | NISESHPNATFSAVGEASICEDDWNSGERFTCTVTHTDLPSPLKQTISRPKGVALHRPDVYLLPPARE |
| | QLNLRESATITCLVTGFSPADVFVQWMQRGQPLSPEKYVTSAPMPEPQAPGRYFAHSILTVSEEEWNT |
| | GETYTCVVAHEALPNRVTERTVDKSTGKPTLYNVSLVMSDTAGTCY |
| | (HIV GAG-Linker-DRB1*15:02-Linker-IgMCm2-4) |
| 212 | FRDYVDRFYKTLRAEQASQEGSGGGGSGGGGSGDTRPRFLWQPKRECHFFNGTERVRFLDRYFYNQEE |
| | SVRFDSDVGEFRAVTELGRPDAEYWNSQKDILEQARAAVDTYCRHNYGVGESFTVQRRVQPKVTVYPS |
| | KTQPLQHHNLLVCSVSGFYPGSIEVRWFLNGQEEKAGMVSTGLIQNCDWTFQTLVMLETVPRSGEVYT |
| | CQVEHPSVTSPLTVEWRARSESAQSKGGGGSGGGGSGGGGSCVPDQDTAIRVFAIPPSFASIFLTKST |
| | KLTCLVTDLTTYDSVTISWTRQNGEAVKTHTNISESHPNATFSAVGEASICEDDWNSGERFTCTVTHT |
| | DLPSPLKQTISRPKGVALHRPDVYLLPPAREQLNLRESATITCLVTGFSPADVFVQWMQRGQPLSPEK |
| | YVTSAPMPEPQAPGRYFAHSILTVSEEEWNTGETYTCVVAHEALPNRVTERTVDKSTGKPTLYNVSLV |
| | MSDTAGTCY |
| | (HIV GAG-Linker-DRB1*15:02-Linker-IgMCm3-4) |
| 213 | FRDYVDRFYKTLRAEQASQEGSGGGGSGGGGSGDTRPRFLWQPKRECHFFNGTERVRFLDRYFYNQEE |
| | SVRFDSDVGEFRAVTELGRPDAEYWNSQKDILEQARAAVDTYCRHNYGVGESFTVQRRVQPKVTVYPS |
| | KTQPLQHHNLLVCSVSGFYPGSIEVRWFLNGQEEKAGMVSTGLIQNGDWTFQTLVMLETVPRSGEVYT |
| | CQVEHPSVTSPLTVEWRARSESAQSKGGGGSGGGGSLDELQAEIEQLEERNYALRKEIEDLQKQLEKL |
| | GAPGSGSIAELPPKVSVFVPPRDGFFGNPRKSKLICQATGFSPRQIQVSWLREGKQVGSGVTTDQVQA |
| | EAKESGPTTYKVTSTLTIKESDWLGQSMFTCRVDHRGLTFQQNASSMCVPDQDTAIRVFAIPPSFASI |
| | FLTKSTKLTCLVTDLTTYDSVTISWTRQNGEAVKTHTNISESHPNATFSAVGEASICEDDWNSGERFT |
| | CTVTHTDLPSPLKQTISRPKGVALHRPDVYLLPPAREQLNLRESATITCLVTGFSPADVFVQWMQRGQ |
| | PLSPEKYVTSAPMPEPQAPGRYFAHSILTVSEEEWNTGETYTCVVAHEALPNRVTERTVDKSTGKPTL |
| | YNVSLVMSDTAGTCY |
| | (HIV GAG-Linker-DRB1*15:02-Linker-FosW-Linker-IgMCm2-4) |
| 214 | RFYKTLRAEQASQGGGGSGGGGSGSGDTRPRFLWQLKFECHFFNGTERVRLLERCIYNQEESVRFDSD |
| | VGEYRAVTELGRPDAEYWNSQKDLLEQRRAAVDTYCRHNYGVGESFTVQRRVEPKVTVYPSKTQPLQH |
| | HNLLVCSVSGFYPGSIEVRWFRNGQEEKAGVVSTGLIQNGDWTFQTLVMLETVPRSGEVYTCQVEHPS |
| | VTSPLTVEWRARSESAQSKGGGGSGGGGSLDELQAEIEQLEERNYALRKEIEDLQKQLEKLGAPGGGG |
| | SGIAELPPKVSVFVPPRDGFFGNPRKSKLICQATGFSPRQIQVSWLREGKQVGSGVTTDQVQAEAKES |
| | GPTTYKVTSTLTIKESDWLGQSMFTCRVDHRGLTFQQNASSMCVPDQDTAIRVFAIPPSFASIFLTKS |
| | TKLTCLVTDLTTYDSVTISWTRQNGEAVKTHTNISESHPNATFSAVGEASICEDDWNSGERFTCTVTH |
| | TDLPSPLKQTISRPKGVALHRPDVYLLPPAREQLNLRESATITCLVTGFSPADVFVQWMQRGQPLSPE |
| | KYVTSAPMPEPQAPGRYFAHSILTVSEEEWNTGETYTCVVAHEALPNRVTERTVDKSTGKPTLYNVSL |
| | VMSDTAGTCY |
| | (HIV RQ13-Linker-DRB1*01:01-Linker-FosW-Linker-IgMCm2-4) |
| 215 | RFYKTLRAEQASQGGGGSGGGGSGSGDTRPRFLWQLKFECHFFNGTERVRLLERCIYNQEESVRFDSD |
| | VGEYRAVTELGRPDAEYWNSQKDLLEQRRAAVDTYCRHNYGVGESFTVQRRVEPKVTVYPSKTQPLQH |
| | HNLLVCSVSGFYPGSIEVRWFRNGQEEKAGVVSTGLIQNGDWTFQTLVMLETVPRSGEVYTCQVEHPS |
| | VTSPLTVEWRARSESAQSKGGGGSGGGGSGGGGSIAELPPKVSVFVPPRDGFFGNPRKSKLICQATGF |
| | SPRQIQVSWLREGKQVGSGVTTDQVQAEAKESGPTTYKVTSTLTIKESDWLGQSMFTCRVDHRGLTFQ |
| | QNASSMCVPDQDTAIRVFAIPPSFASIFLTKSTKLTCLVTDLTTYDSVTISWTRQNGEAVKTHTNISE |
| | SHPNATFSAVGEASICEDDWNSGERFTCTVTHTDLPSPLKQTISRPKGVALHRPDVYLLPPAREQLNL |
| | RESATITCLVTGFSPADVFVQWMQRGQPLSPEKYVTSAPMPEPQAPGRYFAHSILTVSEEEWNTGETY |
| | TCVVAHEALPNRVTERTVDKSTGKPTLYNVSLVMSDTAGTCY |
| | (HIV RQ13-Linker-DRB1*01:01-Linker-IgMCm2-4) |
| 216 | IKEEHVIIQAEFYLNPDQSGEFMFDFDGDEIFHVDMAKKETVWRLEEFGRFASFEAQGALANIAVDKA |
| | NLECMTKRSNYTPITNVPPEVTVLTNSPVELREPNVLICFIDKFTPPVVNVTWLRNGKPVTTGVSETV |
| | FLPRFDHLFRKFHYLPFLPSTEDVYDCRVEHWGLDEPLLKHWEFDAPSPLPETTEGGGGSGGGGSIAR |
| | LEEKVKTLKAQNYELASTANMLREQVAQLGAPGSEQKLISEEDL |
| | (Cys-trap DRA1*01 (I92C)-Linker-cJun-Myc) |
| 217 | IKEEHVIIQAEFYLNPDQSGEFMFDFDGDEIFHVDMAKKETVWRLEEFGRFASFEAQGALANIAVDKA |
| | NLECMTKRSNYTPITNVPPEVTVLTNSPVELREPNVLICFIDKFTPPVVNVTWLRNGKPVTTGVSETV |
| | FLPRFDHLFRKFHYLPFLPSTEDVYDCRVEHWGLDEPLLKHWEFDAPSPLPETTEGSEQKLISEEDL |
| | (Cys-trap DRA1*01 (I92C)-Linker-Myc) |
| 218 | MSQIMYNYPAMMAHCGGGGSGGGGSGSGDTRPRFLWQPKRECHFFNGTERVRFLDRYFYNQEESVRFD |
| | SDVGEFRAVTELGRPDAEYWNSQKDILEQARAAVDTYCRHNYGVVESFTVQRRVQPKVTVYPSKTQPL |
| | QHHNLLVCSVSGFYPGSIEVRWFLNGQEEKAGMVSTGLIQNGDWTFQTLVMLETVPRSGEVYTCQVEH |
| | PSVTSPLTVEWRARSESAQSKGGGGSGGGGSLDELQAEIEQLEERNYALRKEIEDLQKQLEKLGAPGG |
| | GGSGIAELPPKVSVFVPPRDGFFGNPRKSKLICQATGFSPRQIQVSWLREGKQVGSGVTTDQVQAEAK |
| | ESGPTTYKVTSTLTIKESDWLGQSMFTCRVDHRGLTFQQNASSMCVPDQDTAIRVFAIPPSFASIFLT |
| | KSTKLTCLVTDLTTYDSVTISWTRQNGEAVKTHTNISESHPNATFSAVGEASICEDDWNSGERFTCTV |
| | THTDLPSPLKQTISRPKGVALHRPDVYLLPPAREQLNLRESATITCLVTGFSPADVFVQWMQRGQPLS |
| | PEKYVTSAPMPEPQAPGRYFAHSILTVSEEEWNTGETYTCVVAHEALPNRVTERTVDKSTGKPTLYNV |
| | SLVMSDTAGTCY |
| | (Cys-trap MTB(C15)-Linker-DRB1*15:01-Linker-FosW-Linker-IgMCm2-4) |
| 219 | RFYKTLRAEQASQCGGGGSGGGGSGSGDTRPRFLWQLKFECHFFNGTERVRLLERCIYNQEESVRFDS |
| | DVGEYRAVTELGRPDAEYWNSQKDLLEQRRAAVDTYCRHNYGVGESFTVQRRVEPKVTVYPSKTQPLQ |
| | HHNLLVCSVSGFYPGSIEVRWFRNGQEEKAGVVSTGLIQNGDWTFQTLVMLETVPRSGEVYTCQVEHP |
| | SVTSPLTVEWRARSESAQSKGGGGSGGGGSGGGGSIAELPPKVSVFVPPRDGFFGNPRKSKLICQATG |
| | FSPRQIQVSWLREGKQVGSGVTTDQVQAEAKESGPTTYKVTSTLTIKESDWLGQSMFTCRVDHRGLTF |
| | QQNASSMCVPDQDTAIRVFAIPPSFASIFLTKSTKLTCLVTDLTTYDSVTISWTRQNGEAVKTHTNIS |
| | ESHPNATFSAVGEASICEDDWNSGERFTCTVTHTDLPSPLKQTISRPKGVALHRPDVYLLPPAREQLN |
| | LRESATITCLVTGFSPADVFVQWMQRGQPLSPEKYVTSAPMPEPQAPGRYFAHSILTVSEEEWNTGET |
| | YTCVVAHEALPNRVTERTVDKSTGKPTLYNVSLVMSDTAGTCY |
| | (Cys-trap HIV RQ13(C14)-Linker-DRB1*01:01-Linker-IgMCm2-4) |
| 220 | ENPVVHFFKNIVTCGGGGSGGGGSGSGDTRPRFLWQPKRECHFFNGTERVRFLDRYFYNQEESVRFDS |
| | DVGEFRAVTELGRPDAEYWNSQKDILEQARAAVDTYCRHNYGVVESFTVQRRVQPKVTVYPSKTQPLQ |
| | HHNLLVCSVSGFYPGSIEVRWFLNGQEEKAGMVSTGLIQNGDWTFQTLVMLETVPRSGEVYTCQVEHP |
| | SVTSPLTVEWRARSESAQSKGGGGSGGGGSLDELQAEIEQLEERNYALRKEIEDLQKQLEKLGAPGGG |
| | GSGIAELPPKVSVFVPPRDGFFGNPRKSKLICQATGFSPRQIQVSWLREGKQVGSGVTTDQVQAEAKE |
| | SGPTTYKVTSTLTIKESDWLGQSMFTCRVDHRGLTFQQNASSMCVPDQDTAIRVFAIPPSFASIFLTK |
| | STKLTCLVTDLTTYDSVTISWTRQNGEAVKTHTNISESHPNATFSAVGEASICEDDWNSGERFTCTVT |
| | HTDLPSPLKQTISRPKGVALHRPDVYLLPPAREQLNLRESATITCLVTGFSPADVFVQWMQRGQPLSP |
| | EKYVTSAPMPEPQAPGRYFAHSILTVSEEEWNTGETYTCVVAHEALPNRVTERTVDKSTGKPTLYNVS |
| | LVMSDTAGTCY |
| | (Cys-trap MBP(C14)-Linker-DRB1*15:01-Linker-FosW-Linker-IgMCm2-4) |
| 221 | ENPVVHFFKNIVTPGGGGSGGGGSGSGDTRPRFLWQPKRECHFFNGTERVRFLDRYFYNQEESVRFDS |
| | DVGEFRAVTELGRPDAEYWNSQKDILEQARAAVDTYCRHNYGVVESFTVQRRVQPKVTVYPSKTQPLQ |
| | HHNLLVCSVSGFYPGSIEVRWFLNGQEEKAGMVSTGLIQNGDWTFQTLVMLETVPRSGEVYTCQVEHP |
| | SVTSPLTVEWRARSESAQSKGGGGSGGGGSLDELQAEIEQLEERNYALRKEIEDLQKQLEKLGAPGSG |
| | LNDIFEAQKIEWHEGSLPETGGHHHHHHHH |
| | (MBP-Linker-DRB1*15:01-Linker-FosW-Linker-Avitag-Linker-Sortag-His) |
| 222 | MSQIMYNYPAMMAHAGGGGSGGGGSGSGDTRPRFLWQPKRECHFFNGTERVRFLDRYFYNQEESVRFD |
| | SDVGEFRAVTELGRPDAEYWNSQKDILEQARAAVDTYCRHNYGVVESFTVQRRVQPKVTVYPSKTQPL |
| | QHHNLLVCSVSGFYPGSIEVRWFLNGQEEKAGMVSTGLIQNGDWTFQTLVMLETVPRSGEVYTCQVEH |
| | PSVTSPLTVEWRARSESAQSKGGGGSGGGGSLDELQAEIEQLEERNYALRKEIEDLQKQLEKLGAPGS |
| | GLNDIFEAQKIEWHEGSLPETGGHHHHHHHH |
| | (MTB-Linker-DRB1*15:01-Linker-FosW-Linker-Avitag-Linker-Sortag-His) |
| 223 | RFYKTLRAEQASQGGGGSGGGGSGSGDTRPRFLWQLKFECHFFNGTERVRLLERCIYNQEESVRFDSD |
| | VGEYRAVTELGRPDAEYWNSQKDLLEQRRAAVDTYCRHNYGVGESFTVQRRVEPKVTVYPSKTQPLQH |
| | HNLLVCSVSGFYPGSIEVRWFRNGQEEKAGVVSTGLIQNGDWTFQTLVMLETVPRSGEVYTCQVEHPS |
| | VTSPLTVEWRARSESAQSKGGGGSGGGGSLDELQAEIEQLEERNYALRKEIEDLQKQLEKLGAPGSGL |
| | NDIFEAQKIEWHEGSLPETGGHHHHHHHH |
| | (HIV RQ13-Linker-DRB1*15:01-Linker-FosW-Linker-Avitag-Linker- |
| | Sortag-His) |
| 224 | VKQIKVRVDMVRHRIGGGGSGGGGSGSGDTRPRFLEYSTSECHFFNGTERVRYLDRYFHNQEENVRFD |
| | SDVGEFRAVTELGRPDAEYWNSQKDLLEQKRGRVDNYCRHNYGVVESFTVQRRVHPKVTVYPSKTQPL |
| | QHHNLLVCSVSGFYPGSIEVRWFRNGQEEKTGVVSTGLIHNGDWTFQTLVMLETVPRSGEVYTCQVEH |
| | PSVTSPLTVEWRARSESAQSKGGGGSGGGGSLDELQAEIEQLEERNYALRKEIEDLQKQLEKLGAPGS |
| | GLNDIFEAQKIEWHEGSLPETGGHHHHHHHH |
| | (CMV-Linker-DRB1*03:01-Linker-FosW-Linker-Avitag-Linker-Sortag-His) |
| 225 | GPKYVKQNTLKLATGGGGSGGGGSGSGDTRPRFLEQVKHECHFFNGTERVRFLDRYFYHQEEYVRFDS |
| | DVGEYRAVTELGRPDAEYWNSQKDLLEQKRAAVDTYCRHNYGVGESFTVQRRVYPEVTVYPAKTQPLQ |
| | HHNLLVCSVNGFYPGSIEVRWFRNGQEEKTGVVSTGLIQNGDWTFQTLVMLETVPRSGEVYTCQVEHP |
| | SLTSPLTVEWRARSESAQSKGGGGSGGGGSLDELQAEIEQLEERNYALRKEIEDLQKQLEKLGAPGSG |
| | LNDIFEAQKIEWHEGSLPETGGHHHHHHHH |
| | (HA-Linker-DRB1*04:01-Linker-FosW-Linker-Avitag-Linker-Sortag- |
| | Histag) |
| 226 | GPKYVKQNTLKLATGGGGSGGGGSGSGDTRPRFLEQVKHECHFFNGTERVRFLDRYFYHQEEYVRFDS |
| | DVGEYRAVTELGRPDAEYWNSQKDLLEQKRAAVDTYCRHNYGVGESFTVQRRVYPEVTVYPAKTQPLQ |
| | HHNLLVCSVNGFYPGSIEVRWFRNGQEEKTGVVSTGLIQNGDWTFQTLVMLETVPRSGEVYTCQVEHP |
| | SLTSPLTVEWRARSESAQSKGSGLNDIFEAQKIEWHEGSLPETGGHHHHHHHH |
| | (HA-Linker-DRB1*04:01-Linker-Avitag-Linker-Sortag-Histag) |
| 227 | ENPVVHFFKNIVTCGGGGSGGGGSGSGDTRPRFLWQPKRECHFFNGTERVRFLDRYFYNQEESVRFDS |
| | DVGEFRAVTELGRPDAEYWNSQKDILEQARAAVDTYCRHNYGVVESFTVQRRVQPKVTVYPSKTQPLQ |
| | HHNLLVCSVSGFYPGSIEVRWFLNGQEEKAGMVSTGLIQNGDWTFQTLVMLETVPRSGEVYTCQVEHP |
| | SVTSPLTVEWRARSESAQSKGGGGSGGGGSLDELQAEIEQLEERNYALRKEIEDLQKQLEKLGAPGSG |
| | LNDIFEAQKIEWHEGSLPETGGHHHHHHHH |
| | (MBP(C14)-Linker-DRB1*15:01-Linker-FosW-Linker-Avitag-Linker- |
| | Sortag-Histag) |
| 228 | MSQIMYNYPAMMAHCGGGGSGGGGSGSGDTRPRFLWQPKRECHFFNGTERVRFLDRYFYNQEESVRFD |
| | SDVGEFRAVTELGRPDAEYWNSQKDILEQARAAVDTYCRHNYGVVESFTVQRRVQPKVTVYPSKTQPL |
| | QHHNLLVCSVSGFYPGSIEVRWFLNGQEEKAGMVSTGLIQNGDWTFQTLVMLETVPRSGEVYTCQVEH |
| | PSVTSPLTVEWRARSESAQSKGGGGSGGGGSLDELQAEIEQLEERNYALRKEIEDLQKQLEKLGAPGS |
| | GLNDIFEAQKIEWHEGSLPETGGHHHHHHHH |
| | (MTB(C15)-Linker-DRB1*15:01-Linker-FosW-Linker-Avitag-Linker- |
| | Sortag-Histag) |
| 229 | VKQIKVRVDMVRHRCGGGGSGGGGSGSGDTRPRFLEYSTSECHFFNGTERVRYLDRYFHNQEENVRFD |
| | SDVGEFRAVTELGRPDAEYWNSQKDLLEQKRGRVDNYCRHNYGVVESFTVQRRVHPKVTVYPSKTQPL |
| | QHHNLLVCSVSGFYPGSIEVRWFRNGQEEKTGVVSTGLIHNGDWTFQTLVMLETVPRSGEVYTCQVEH |
| | PSVTSPLTVEWRARSESAQSKGSGLNDIFEAQKIEWHEGSLPETGGHHHHHHHH |
| | (CMV(C14)-DRB1*03:01-Linker-Avitag-Linker-Sortag-Histag) |
| 230 | GPKYVKQNTLKLCTGGGGSGGGGSGSGDTRPRFLEQVKHECHFFNGTERVRFLDRYFYHQEEYVRFDS |
| | DVGEYRAVTELGRPDAEYWNSQKDLLEQKRAAVDTYCRHNYGVGESFTVQRRVYPEVTVYPAKTQPLQ |
| | HHNLLVCSVNGFYPGSIEVRWFRNGQEEKTGVVSTGLIQNGDWTFQTLVMLETVPRSGEVYTCQVEHP |
| | SLTSPLTVEWRARSESAQSKGGGGSGGGGSLDELQAEIEQLEERNYALRKEIEDLQKQLEKLGAPGSG |
| | LNDIFEAQKIEWHEGSLPETGGHHHHHHHH |
| | (HA(C13)-Linker-DRB1*04:01-Linker-FosW-Linker-Avitag-Linker-Sortag- |
| | Histag) |
| 231 | GPKYVKQNTLKLACGGGGSGGGGSGSGDTRPRFLEQVKHECHFFNGTERVRFLDRYFYHQEEYVRFDS |
| | DVGEYRAVTELGRPDAEYWNSQKDLLEQKRAAVDTYCRHNYGVGESFTVQRRVYPEVTVYPAKTQPLQ |
| | HHNLLVCSVNGFYPGSIEVRWFRNGQEEKTGVVSTGLIQNGDWTFQTLVMLETVPRSGEVYTCQVEHP |
| | SLTSPLTVEWRARSESAQSKGSGLNDIFEAQKIEWHEGSLPETGGHHHHHHHH |
| | (HA(C14)-Linker-DRB1*04:01-Linker-Avitag-Linker-Sortag-Histag) |
| 232 | HHHHHHHH |
| | (His8 tag) |
| 233 | NLVPMIATV |
| 234 | MTINYQFGDVDAHGA |
| 235 | ALWEIQQVVGGGGSGGGGSGGGGSIQRTPKIQVYSRHPAENGKSNFLNCYVSGFHPSDIEVDLLKNGE |
| | RIEKVEHSDLSFSKDWSFYLLYYTEFTPTEKDEYACRVNHVTLSQPKIVKWDRDMGGGGSGGGGSGGG |
| | GSGGGGSGSHSMRYFFTSVSRPGRGEPRFIAVGYVDDTQFVRFDSDAASQRMEPRAPWIEQEGPEYWD |
| | GETRKVKAHSQTHRVDLGTLRGAYNQSEAGSHTVQRMYGCDVGSDWRFLRGYHQYAYDGKDYIALKED |
| | LRSWTAADMAAQTTKHKWEAAHVAEQLRAYLEGTCVEWLRRYLENGKETLQRTDAPKTHMTHHAVSDH |
| | EATLRCWALSFYPAEITLTWQRDGEDQTQDTELVETRPAGDGTFQKWAAVVVPSGQEQRYTCHVQHEG |
| | LPKPLTLRWEPSSGGGGSGGGGSGGGGSIAELPPKVSVFVPPRDGFFGNPRKSKLICQATGFSPRQIQ |
| | VSWLREGKQVGSGVTTDQVQAEAKESGPTTYKVTSTLTIKESDWLGQSMFTCRVDHRGLTFQQNASSM |
| | CVPDQDTAIRVFAIPPSFASIFLTKSTKLTCLVTDLTTYDSVTISWTRQNGEAVKTHTNISESHPNAT |
| | FSAVGEASICEDDWNSGERFTCTVTHTDLPSPLKQTISRPKGVALHRPDVYLLPPAREQLNLRESATI |
| | TCLVTGFSPADVFVQWMQRGQPLSPEKYVTSAPMPEPQAPGRYFAHSILTVSEEEWNTGETYTCVVAH |
| | EALPNRVTERTVDKSTGKPTLYNVSLVMSDTAGTCY |
| | (ALW_B2M_HLAA2_IgM2-4) |
| 236 | KLWAQCVQLGGGGSGGGGSGGGGSIQRTPKIQVYSRHPAENGKSNFLNCYVSGFHPSDIEVDLLKNGE |
| | RIEKVEHSDLSFSKDWSFYLLYYTEFTPTEKDEYACRVNHVTLSQPKIVKWDRDMGGGGSGGGGSGGG |
| | GSGGGGSGSHSMRYFFTSVSRPGRGEPRFIAVGYVDDTQFVRFDSDAASQRMEPRAPWIEQEGPEYWD |
| | GETRKVKAHSQTHRVDLGTLRGAYNQSEAGSHTVQRMYGCDVGSDWRFLRGYHQYAYDGKDYIALKED |
| | LRSWTAADMAAQTTKHKWEAAHVAEQLRAYLEGTCVEWLRRYLENGKETLQRTDAPKTHMTHHAVSDH |
| | EATLRCWALSFYPAEITLTWQRDGEDQTQDTELVETRPAGDGTFQKWAAVVVPSGQEQRYTCHVQHEG |
| | LPKPLTLRWEPSSGGGGSGGGGSGGGGSIAELPPKVSVFVPPRDGFFGNPRKSKLICQATGFSPRQIQ |
| | VSWLREGKQVGSGVTTDQVQAEAKESGPTTYKVTSTLTIKESDWLGQSMFTCRVDHRGLTFQQNASSM |
| | CVPDQDTAIRVFAIPPSFASIFLTKSTKLTCLVTDLTTYDSVTISWTRQNGEAVKTHTNISESHPNAT |
| | FSAVGEASICEDDWNSGERFTCTVTHTDLPSPLKQTISRPKGVALHRPDVYLLPPAREQLNLRESATI |
| | TCLVTGFSPADVFVQWMQRGQPLSPEKYVTSAPMPEPQAPGRYFAHSILTVSEEEWNTGETYTCVVAH |
| | EALPNRVTERTVDKSTGKPTLYNVSLVMSDTAGTCY |
| | (KLW_B2M_HLAA2_IgM2-4) |
| 237 | YMLDLQPETTGGGGSGGGGSGGGGSIQRTPKIQVYSRHPAENGKSNFLNCYVSGFHPSDIEVDLLKNG |
| | ERIEKVEHSDLSFSKDWSFYLLYYTEFTPTEKDEYACRVNHVTLSQPKIVKWDRDMGGGGSGGGGSGG |
| | GGSGGGGSGSHSMRYFFTSVSRPGRGEPRFIAVGYVDDTQFVRFDSDAASQRMEPRAPWIEQEGPEYW |
| | DGETRKVKAHSQTHRVDLGTLRGAYNQSEAGSHTVQRMYGCDVGSDWRFLRGYHQYAYDGKDYIALKE |
| | DLRSWTAADMAAQTTKHKWEAAHVAEQLRAYLEGTCVEWLRRYLENGKETLQRTDAPKTHMTHHAVSD |
| | HEATLRCWALSFYPAEITLTWQRDGEDQTQDTELVETRPAGDGTFQKWAAVVVPSGQEQRYTCHVQHE |
| | GLPKPLTLRWEPSSGGGGSGGGGSGGGGSIAELPPKVSVFVPPRDGFFGNPRKSKLICQATGFSPRQI |
| | QVSWLREGKQVGSGVTTDQVQAEAKESGPTTYKVTSTLTIKESDWLGQDMFTCRVDHRGLTFQQNASS |
| | MCVPDQDTAIRVFAIPPSFASIFLTKSTKLTCLVTDLTTYDSVTISWTRQNGEAVKTHTNISESHPNA |
| | TFSAVGEASICEDDWNSGERFTCTVTHTDLPSPLKQTISRPKGVALHRPDVYLLPPAREQLNLRESAT |
| | ITCLVTGFSPADVFVQWMQRGQPLSPEKYVTSAPMPEPQAPGRYFAHSILTVSEEEWNTGETYTCVVA |
| | HEALPNRVTERTVDKSTGKPTLYNVSLVMSDTAGTCY |
| | (YML_B2M_HLAA2_IgM2-4) |
| 238 | NLVPMVATVGCGGSGGGGSGGGGSIQRTPKIQVYSRHPAENGKSNFLNCYVSGFHPSDIEVDLLKNGE |
| | RIEKVEHSDLSFSKDWSFYLLYYTEFTPTEKDEYACRVNHVTLSQPKIVKWDRDMGGGGSGGGGSGGG |
| | GSGGGGSGSHSMRYFFTSVSRPGRGEPRFIAVGYVDDTQFVRFDSDAASQRMEPRAPWIEQEGPEYWD |
| | GETRKVKAHSQTHRVDLGTLRGCYNQSEAGSHTVQRMYGCDVGSDWRFLRGYHQYAYDGKDYIALKED |
| | LRSWTAADMAAQTTKHKWEAAHVAEQLRAYLEGTCVEWLRRYLENGKETLQRTDAPKTHMTHHAVSDH |
| | EATLRCWALSFYPAEITLTWQRDGEDQTQDTELVETRPAGDGTFQKWAAVVVPSGQEQRYTCHVQHEG |
| | LPKPLTLRWEPSSGGGGSGGGGSGGGGSIAELPPKVSVFVPPRDGFFGNPRKSKLICQATGFSPRQIQ |
| | VSWLREGKQVGSGVTTDQVQAEAKESGPTTYKVTSTLTIKESDWLGQSMFTCRVDHRGLTFQQNASSM |
| | CVPDQDTAIRVFAIPPSFASIFLTKSTKLTCLVTDLTTYDSVTISWTRQNGEAVKTHTNISESHPNAT |
| | FSAVGEASICEDDWNSGERFTCTVTHTDLPSPLKQTISRPKGVALHRPDVYLLPPAREQLNLRESATI |
| | TCLVTGFSPADVFVQWMQRGQPLSPEKYVTSAPMPEPQAPGRYFAHSILTVSEEEWNTGETYTCVVAH |
| | EALPNRVTERTVDKSTGKPTLYNVSLVMSDTAGTCY |
| | (cys-trap NLV_B2M_HLAA2 IgM2-4) |
| 239 | ELAGIGILTVGCGGSGGGGSGGGGSIQRTPKIQVYSRHPAENGKSNFLNCYVSGFHPSDIEVDLLKNG |
| | ERIEKVEHSDLSFSKDWSFYLLYYTEFTPTEKDEYACRVNHVTLSQPKIVKWDRDMGGGGSGGGGSGG |
| | GGSGGGGSGSHSMRYFFTSVSRPGRGEPRFIAVGYVDDTQFVRFDSDAASQRMEPRAPWIEQEGPEYW |
| | DGETRKVKAHSQTHRVDLGTLRGCYNQSEAGSHTVQRMYGCDVGSDWRFLRGYHQYAYDGKDYIALKE |
| | DLRSWTAADMAAQTTKHKWEAAHVAEQLRAYLEGTCVEWLRRYLENGKETLQRTDAPKTHMTHHAVSD |
| | HEATLRCWALSFYPAEITLTWQRDGEDQTQDTELVETRPAGDGTFQKWAAVVVPSGQEQRYTCHVQHE |
| | GLPKPLTLRWEPSSGGGGSGGGGSGGGGSIAELPPKVSVFVPPRDGFFGNPRKSKLICQATGFSPRQI |
| | QVSWLREGKQVGSGVTTDQVQAEAKESGPTTYKVTSTLTIKESDWLGQSMFTCRVDHRGLTFQQNASS |
| | MCVPDQDTAIRVFAIPPSFASIFLTKSTKLTCLVTDLTTYDSVTISWTRQNGEAVKTHTNISESHPNA |
| | TFSAVGEASICEDDWNSGERFTCTVTHTDLPSPLKQTISRPKGVALHRPDVYLLPPAREQLNLRESAT |
| | ITCLVTGFSPADVFVQWMQRGQPLSPEKYVTSAPMPEPQAPGRYFAHSILTVSEEEWNTGETYTCVVA |
| | HEALPNRVTERTVDKSTGKPTLYNVSLVMSDTAGTCY |
| | (cys-trap ELA_B2M_HLAA2_IgM2-4) |
| 240 | ALWEIQQVVGCGGSGGGGSGGGGSIQRTPKIQVYSRHPAENGKSNFLNCYVSGFHPSDIEVDLLKNGE |
| | RIEKVEHSDLSFSKDWSFYLLYYTEFTPTEKDEYACRVNHVTLSQPKIVKWDRDMGGGGSGGGGSGGG |
| | GSGGGGSGSHSMRYFFTSVSRPGRGEPRFIAVGYVDDTQFVRFDSDAASQRMEPRAPWIEQEGPEYWD |
| | GETRKVKAHSQTHRVDLGTLRGCYNQSEAGSHTVQRMYGCDVGSDWRFLRGYHQYAYDGKDYIALKED |
| | LRSWTAADMAAQTTKHKWEAAHVAEQLRAYLEGTCVEWLRRYLENGKETLQRTDAPKTHMTHHAVSDH |
| | EATLRCWALSFYPAEITLTWQRDGEDQTQDTELVETRPAGDGTFQKWAAVVVPSGQEQRYTCHVQHEG |
| | LPKPLTLRWEPSSGGGGSGGGGSGGGGSIAELPPKVSVFVPPRDGFFGNPRKSKLICQATGESPRQIQ |
| | VSWLREGKQVGSGVTTDQVQAEAKESGPTTYKVTSTLTIKESDWLGQSMFTCRVDHRGLTFQQNASSM |
| | CVPDQDTAIRVFAIPPSFASIFLTKSTKLTCLVTDLTTYDSVTISWTRQNGEAVKTHTNISESHPNAT |
| | FSAVGEASICEDDWNSGERFTCTVTHTDLPSPLKQTISRPKGVALHRPDVYLLPPAREQLNLRESATI |
| | TCLVTGFSPADVFVQWMQRGQPLSPEKYVTSAPMPEPQAPGRYFAHSILTVSEEEWNTGETYTCVVAH |
| | EALPNRVTERTVDKSTGKPTLYNVSLVMSDTAGTCY |
| | (cys-trap ALW_B2M_HLAA2_IgM2-4) |
| 241 | KLWAQCVQLGCGGSGGGGSGGGGSIQRTPKIQVYSRHPAENGKSNFLNCYVSGFHPSDIEVDLLKNGE |
| | RIEKVEHSDLSFSKDWSFYLLYYTEFTPTEKDEYACRVNHVTLSQPKIVKWDRDMGGGGSGGGGSGGG |
| | GSGGGGSGSHSMRYFFTSVSRPGRGEPRFIAVGYVDDTQFVRFDSDAASQRMEPRAPWIEQEGPEYWD |
| | GETRKVKAHSQTHRVDLGTLRGCYNQSEAGSHTVQRMYGCDVGSDWRFLRGYHQYAYDGKDYIALKED |
| | LRSWTAADMAAQTTKHKWEAAHVAEQLRAYLEGTCVEWLRRYLENGKETLQRTDAPKTHMTHHAVSDH |
| | EATLRCWALSFYPAEITLTWQRDGEDQTQDTELVETRPAGDGTFQKWAAVVVPSGQEQRYTCHVQHEG |
| | LPKPLTLRWEPSSGGGGSGGGGSGGGGSIAELPPKVSVFVPPRDGFFGNPRKSKLICQATGFSPRQIQ |
| | VSWLREGKQVGSGVTTDQVQAEAKESGPTTYKVTSTLTIKESDWLGQSMFTCRVDHRGLTFQQNASSM |
| | CVPDQDTAIRVFAIPPSFASIFLTKSTKLTCLVTDLTTYDSVTISWTRQNGEAVKTHTNISESHPNAT |
| | FSAVGEASICEDDWNSGERFTCTVTHTDLPSPLKQTISRPKGVALHRPDVYLLPPAREQLNLRESATI |
| | TCLVTGFSPADVFVQWMQRGQPLSPEKYVTSAPMPEPQAPGRYFAHSILTVSEEEWNTGETYTCVVAH |
| | EALPNRVTERTVDKSTGKPTLYNVSLVMSDTAGTCY |
| | (cys-trap KLW_B2M_HLAA2_IgM2-4) |
| 242 | YMLDLQPETTGCGGSGGGGSGGGGSIQRTPKIQVYSRHPAENGKSNFLNCYVSGFHPSDIEVDLLKNG |
| | ERIEKVEHSDLSFSKDWSFYLLYYTEFTPTEKDEYACRVNHVTLSQPKIVKWDRDMGGGGSGGGGSGG |
| | GGSGGGGSGSHSMRYFFTSVSRPGRGEPRFIAVGYVDDTQFVRFDSDAASQRMEPRAPWIEQEGPEYW |
| | DGETRKVKAHSQTHRVDLGTLRGCYNQSEAGSHTVQRMYGCDVGSDWRFLRGYHQYAYDGKDYIALKE |
| | DLRSWTAADMAAQTTKHKWEAAHVAEQLRAYLEGTCVEWLRRYLENGKETLQRTDAPKTHMTHHAVSD |
| | HEATLRCWALSFYPAEITLTWQRDGEDQTQDTELVETRPAGDGTFQKWAAVVVPSGQEQRYTCHVQHE |
| | GLPKPLTLRWEPSSGGGGSGGGGSGGGGSIAELPPKVSVFVPPRDGFFGNPRKSKLICQATGFSPRQI |
| | QVSWLREGKQVGSGVTTDQVQAEAKESGPTTYKVTSTLTIKESDWLGQSMFTCRVDHRGLTFQQNASS |
| | MCVPDQDTAIRVFAIPPSFASIFLTKSTKLTCLVTDLTTYDSVTISWTRQNGEAVKTHTNISESHPNA |
| | TFSAVGEASICEDDWNSGERFTCTVTHTDLPSPLKQTISRPKGVALHRPDVYLLPPAREQLNLRESAT |
| | ITCLVTGFSPADVFVQWMQRGQPLSPEKYVTSAPMPEPQAPGRYFAHSILTVSEEEWNTGETYTCVVA |
| | HEALPNRVTERTVDKSTGKPTLYNVSLVMSDTAGTCY |
| | (cys-trap YML_B2M_HLAA2_IgM2-4) |
| 243 | ELAGIGILTVGGGGSGGGGSGGGGSIQRTPKIQVYSRHPAENGKSNFLNCYVSGFHPSDIEVDLLKNG |
| | ERIEKVEHSDLSFSKDWSFYLLYYTEFTPTEKDEYACRVNHVTLSQPKIVKWDRDMGGGGSGGGGSGG |
| | GGSGGGGSGSHSMRYFFTSVSRPGRGEPRFIAVGYVDDTQFVRFDSDAASQRMEPRAPWIEQEGPEYW |
| | DGETRKVKAHSQTHRVDLGTLRGAYNQSEAGSHTVQRMYGCDVGSDWRFLRGYHQYAYDGKDYIALKE |
| | DLRSWTAADMAAQTTKHKWEAAHVAEQLRAYLEGTCVEWLRRYLENGKETLQRTDAPKTHMTHHAVSD |
| | HEATLRCWALSFYPAEITLTWQRDGEDQTQDTELVETRPAGDGTFQKWAAVVVPSGQEQRYTCHVQHE |
| | GLPKPLTLRWEPSSGSGSAGGSGSGGGSLPETGGHHHHHH |
| | (single-chain ELA-A2 LPETGG monomer) |
| 244 | GGGGSGGGGSGGGGSIAELPPKVSVFVPPRDGFFGNPRKSKLICQATGFSPRQIQVSWLREGKQVGSG |
| | VTTDQVQAEAKESGPTTYKVTSTLTIKESDWLGQSMFTCRVDHRGLTFQQNASSMCVPDQDTAIRVFA |
| | IPPSFASIFLTKSTKLTCLVTDLTTYDSVTISWTRQNGEAVKTHTNISESHPNATFSAVGEASICEDD |
| | WNSGERFTCTVTHTDLPSPLKQTISRPKGVALHRPDVYLLPPAREQLNLRESATITCLVTGFSPADVF |
| | VQWMQRGQPLSPEKYVTSAPMPEPQAPGRYFAHSILTVSEEEWNTGETYTCVVAHEALPNRVTERTVD |
| | KSTGKPTLYNVSLVMSDTAGTCY |
| | (GGG-IgM Fc for sortase mediated conjugation) |
| 245 | FTVTVPKDLYVVEYGSNMTIECKFPVEKQLDLAALIVYWEMEDKNIIQFVHGEEDLKVQHSSYRQRAR |
| | LLKDQLSLGNAALQITDVKLQDAGVYRCMISYGGADYKRITVKVNAPYNKINQRILVVDPVTSEHELT |
| | CQAEGYPKAEVIWTSSDHQVLSGKTTTTNSKREEKLFNVTSTLRINTTTNEIFYCTFRRLDPEENHTA |
| | ELVIPELPLAHPPNERGGGGSGGGGSGGGGSGGGGSGGGGSQEDERIVLVDNKCKCARITSRIIRSSE |
| | DPNEDIVERNIRIIVPLNNRENISDPTSPLRTRFVYHLSDLCKKCDPTEVELDNQIVTATQSNICDED |
| | SATETCYTYDRNKCYTAVVPLVYGGETKMVETALTPDACYPDGGGGSGGGGSDYKDDDDKHHHHHHHH |
| | (PD-L1-ECD-J-chain-Flag-His) |
| 246 | FTVTVPKDLYVVEYGSNMTIECKFPVEKQLDLAALIVYWEMEDKNIIQFVHGEEDLKVQHSSYRQRAR |
| | LLKDQLSLGNAALQITDVKLQDAGVYRCMISYGGADYKRITVKVNAGGGGSGGGGSGGGGSGGGGSGG |
| | GGSQEDERIVLVDNKCKCARITSRIIRSSEDPNEDIVERNIRIIVPLNNRENISDPTSPLRTRFVYHL |
| | SDLCKKCDPTEVELDNQIVTATQSNICDEDSATETCYTYDRNKCYTAVVPLVYGGETKMVETALTPDA |
| | CYPDGGGGSGGGGSDYKDDDDKHHHHHHHH |
| | (PD-L1-D1-Linker-Jchain-Flag-His) |
| 247 | QVQLQQSGAELARPGASVKMSCKASGYTFTRYTMHWVKQRPGQGLEWIGYINPSRGYTNYNQKFKDKA |
| | TLTTDKSSSTAYMQLSSLTSEDSAVYYCARYYDDHYSLDYWGQGTTLTVSSGGGGSGGGGSGGGGSQI |
| | VLTQSPAIMSASPGEKVTMTCSASSSVSYMNWYQQKSGTSPKRWIYDTSKLASGVPAHFRGSGSGTSY |
| | SLTISGMEAEDAATYYCQQWSSNPFTFGSGTKLEIKGGGGSGGGGSGGGGSQEDERIVLVDNKCKCAR |
| | ITSRIIRSSEDPNEDIVERNIRIIVPLNNRENISDPTSPLRTRFVYHLSDLCKKCDPTEVELDNQIVT |
| | ATQSNICDEDSATETCYTYDRNKCYTAVVPLVYGGETKMVETALTPDACYPDGGGGSGGGGSDYKDDD |
| | DKHHHHHHHH |
| | (Anti-CD3scFv-Linker-Jchain-Flag-His) |
| 248 | NLVPMVATVGGGGSGGGGSGGGGSIQRTPKIQVYSRHPAENGKSNFLNCYVSGFHPSDIEVDLLKNGE |
| | RIEKVEHSDLSFSKDWSFYLLYYTEFTPTEKDEYACRVNHVTLSQPKIVKWDRDMGGGGSGGGGSGGG |
| | GSGGGGSGSHSMRYFFTSVSRPGRGEPRFIAVGYVDDTQFVRFDSDAASQRMEPRAPWIEQEGPEYWD |
| | GETRKVKAHSQTHRVDLGTLRGAYNQSEAGSHTVQRMYGCDVGSDWRFLRGYHQYAYDGKDYIALKED |
| | LRSWTAADMAAQTTKHKWEAAHVAEQLRAYLEGTCVEWLRRYLENGKETLQRTDAPKTHMTHHAVSDH |
| | EATLRCWALSFYPAEITLTWQRDGEDQTQDTELVETRPAGDGTFQKWAAVVVPSGQEQRYTCHVQHEG |
| | LPKPLTLRWEPSSGGGGSGGGGSGGGGSCVPDQDTAIRVFAIPPSFASIFLTKSTKLTCLVTDLTTYD |
| | SVTISWTRQNGEAVKTHTNISESHPNATFSAVGEASICEDDWNSGERFTCTVTHTDLPSPLKQTISRP |
| | KGVALHRPDVYLLPPAREQLNLRESATITCLVTGFSPADVFVQWMQRGQPLSPEKYVTSAPMPEPQAP |
| | GRYFAHSILTVSEEEWNTGETYTCVVAHEALPNRVTERTVDKSTGKPTLYNVSLVMSDTAGTCY |
| | (NLV_B2M_HLAA2_IgM3-4_var2) |
| 249 | ELAGIGILTVGGGGSGGGGSGGGGSIQRTPKIQVYSRHPAENGKSNFLNCYVSGFHPSDIEVDLLKNG |
| | ERIEKVEHSDLSFSKDWSFYLLYYTEFTPTEKDEYACRVNHVTLSQPKIVKWDRDMGGGGSGGGGSGG |
| | GGSGGGGSGSHSMRYFFTSVSRPGRGEPRFIAVGYVDDTQFVRFDSDAASQRMEPRAPWIEQEGPEYW |
| | DGETRKVKAHSQTHRVDLGTLRGAYNQSEAGSHTVQRMYGCDVGSDWRFLRGYHQYAYDGKDYIALKE |
| | DLRSWTAADMAAQTTKHKWEAAHVAEQLRAYLEGTCVEWLRRYLENGKETLQRTDAPKTHMTHHAVSD |
| | HEATLRCWALSFYPAEITLTWQRDGEDQTQDTELVETRPAGDGTFQKWAAVVVPSGQEQRYTCHVQHE |
| | GLPKPLTLRWEPSSGGGGSGGGGSGGGGSCVPDQDTAIRVFAIPPSFASIFLTKSTKLTCLVTDLTTY |
| | DSVTISWTRQNGEAVKTHTNISESHPNATFSAVGEASICEDDWNSGERFTCTVTHTDLPSPLKQTISR |
| | PKGVALHRPDVYLLPPAREQLNLRESATITCLVTGFSPADVFVQWMQRGQPLSPEKYVTSAPMPEPQA |
| | PGRYFAHSILTVSEEEWNTGETYTCVVAHEALPNRVTERTVDKSTGKPTLYNVSLVMSDTAGTCY |
| | (ELA_B2M_HLAA2_IgM3-4_var2) |
| 250 | QVQLQQSGAELARPGASVKMSCKASGYTFTRYTMHWVKQRPGQGLEWIGYINPSRGYTNYNQKFKDKA |
| | TLTTDKSSSTAYMQLSSLTSEDSAVYYCARYYDDHYSLDYWGQGTTLTVSSGGGGSGGGGSGGGGSQI |
| | VLTQSPAIMSASPGEKVTMTCSASSSVSYMNWYQQKSGTSPKRWIYDTSKLASGVPAHFRGSGSGTSY |
| | SLTISGMEAEDAATYYCQQWSSNPFTFGSGTKLEIK |
| | (Anti-CD3 scFv) |
| 251 | QEDERIVLVDNKCKCARITSRIIRSSEDPNEDIVERNIRIIVPLNNRENISDPTSPLRTRFVYHLSDL |
| | CKKCDPTEVELDNQIVTATQSNICDEDSATETCYTYDRNKCYTAVVPLVYGGETKMVETALTPDACYP |
| | DGGGGSGGGGSDYKDDDDKHHHHHHHH |
| | (Jchain-(G4S)2-Flag-His) |
| 252 | QEDERIVLVDNKCKCARITSRIIRSSEDPNEDIVERNIRIIVPLNNRENISDPTSPLRTRFVYHLSDL |
| | CKKCDPTEVELDNQIVTATQSNICDEDSATETCYTYDRNKCYTAVVPLVYGGETKMVETALTPDACYP |
| | DGGGGSGGGGSGGGGSQVQLQQSGAELARPGASVKMSCKASGYTFTRYTMHWVKQRPGQGLEWIGYIN |
| | PSRGYTNYNQKFKDKATLTTDKSSSTAYMQLSSLTSEDSAVYYCARYYDDHYSLDYWGQGTTLTVSSG |
| | GGGSGGGGSGGGGSQIVLTQSPAIMSASPGEKVTMTCSASSSVSYMNWYQQKSGTSPKRWIYDTSKLA |
| | SGVPAHFRGSGSGTSYSLTISGMEAEDAATYYCQQWSSNPFTFGSGTKLEIK |
| | (Human Ig J chain with anti-CD3 at C-terminus) |
| 253 | QVQLQQSGAELARPGASVKMSCKASGYTFTRYTMHWVKQRPGQGLEWIGYINPSRGYTNYNQKFKDKA |
| | TLTTDKSSSTAYMQLSSLTSEDSAVYYCARYYDDHYSLDYWGQGTTLTVSSGGGGSGGGGSGGGGSQI |
| | VLTQSPAIMSASPGEKVTMTCSASSSVSYMNWYQQKSGTSPKRWIYDTSKLASGVPAHFRGSGSGTSY |
| | SLTISGMEAEDAATYYCQQWSSNPFTFGSGTKLEIKGGGGSGGGGSGGGGSQEDERIVLVDNKCKCAR |
| | ITSRIIRSSEDPNEDIVERNIRIIVPLNNRENISDPTSPLRTRFVYHLSDLCKKCDPTEVELDNQIVT |
| | ATQSNICDEDSATETCYTYDRNKCYTAVVPLVYGGETKMVETALTPDACYPD |
| | (Human Ig J chain with anti-CD3 at N-terminus) |
| 254 | CVPDQDTAIRVFAIPPSFASIFLTKSTKLTCLVTDLTTYDSVTISWTRQNGEAVKTHTNISESHPNAT |
| | FSAVGEASICEDDWNSGERFTCTVTHTDLPSPLKQTISRPKGVALHRPDVYLLPPAREQLNLRESATI |
| | TCLVTGFSPADVFVQWMQRGQPLSPEKYVTSAPMPEPQAPGRYFAHSILTVSEEEWNTGETYTCVVAH |
| | EALPNRVTERTVDKSTGKPTLYNVSLVMSDTAGTCY |
| | (IgM Cm3-Cm4_var2) |
| 255 | LDELQAEIEQLEERNYALRKEIEDLQKQLEKLGAP |
| | (optimized FosW) |
| 256 | IARLEEKVKTLKAQNYELASTANMLREQVAQLGAP |
| | (optimized cJun) |
| 257 | ALWEIQQVV |
| | (HLA-A*02:01 restricted SARS-COV-2 Orflab epitope) |
| 258 | KLWAQCVQL |
| | (HLA-A*02:01 restricted SARS-COV-2 Orflab epitope) |
| 259 | GGGGSGGGGSGGGGSIQRTPKIQVYSRHPAENGKSNFLNCYVSGFHPSDIEVDLLKNGERIEKVEHSD |
| | LSFSKDWSFYLLYYTEFTPTEKDEYACRVNHVTLSQPKIVKWDRDMGGGGSGGGGSGGGGSGGGGSGS |
| | HSMRYFFTSVSRPGRGEPRFIAVGYVDDTQFVRFDSDAASQRMEPRAPWIEQEGPEYWDGETRKVKAH |
| | SQTHRVDLGTLRGAYNQSEAGSHTVQRMYGCDVGSDWRFLRGYHQYAYDGKDYIALKEDLRSWTAADM |
| | AAQTTKHKWEAAHVAEQLRAYLEGTCVEWLRRYLENGKETLQRTDAPKTHMTHHAVSDHEATLRCWAL |
| | SFYPAEITLTWQRDGEDQTQDTELVETRPAGDGTFQKWAAVVVPSGQEQRYTCHVQHEGLPKPLTLRW |
| | EPSSGGGGSGGGGSGGGGSIAELPPKVSVFVPPRDGFFGNPRKSKLICQATGFSPRQIQVSWLREGKQ |
| | VGSGVTTDQVQAEAKESGPTTYKVTSTLTIKESDWLGQSMFTCRVDHRGLTFQQNASSMCVPDQDTAI |
| | RVFAIPPSFASIFLTKSTKLTCLVTDLTTYDSVTISWTRQNGEAVKTHTNISESHPNATFSAVGEASI |
| | CEDDWNSGERFTCTVTHTDLPSPLKQTISRPKGVALHRPDVYLLPPAREQLNLRESATITCLVTGFSP |
| | ADVFVQWMQRGQPLSPEKYVTSAPMPEPQAPGRYFAHSILTVSEEEWNTGETYTCVVAHEALPNRVTE |
| | RTVDKSTGKPTLYNVSLVMSDTAGTCY |
| | (GS Linker-b2m-GS linker-HLA A2-linker-IgM2-4) |
| 260 | GGGGSGGGGSGGGGSIQRTPKIQVYSRHPAENGKSNFLNCYVSGFHPSDIEVDLLKNGERIEKVEHSD |
| | LSFSKDWSFYLLYYTEFTPTEKDEYACRVNHVTLSQPKIVKWDRDMGGGGSGGGGSGGGGSGGGGSGS |
| | HSMRYFFTSVSRPGRGEPRFIAVGYVDDTQFVRFDSDAASQRMEPRAPWIEQEGPEYWDGETRKVKAH |
| | SQTHRVDLGTLRGAYNQSEAGSHTVQRMYGCDVGSDWRFLRGYHQYAYDGKDYIALKEDLRSWTAADM |
| | AAQTTKHKWEAAHVAEQLRAYLEGTCVEWLRRYLENGKETLQRTDAPKTHMTHHAVSDHEATLRCWAL |
| | SFYPAEITLTWQRDGEDQTQDTELVETRPAGDGTFQKWAAVVVPSGQEQRYTCHVQHEGLPKPLTLRW |
| | EPSSIAELPPKVSVFVPPRDGFFGNPRKSKLICQATGFSPRQIQVSWLREGKQVGSGVTTDQVQAEAK |
| | ESGPTTYKVTSTLTIKESDWLGQSMFTCRVDHRGLTFQQNASSMCVPDQDTAIRVFAIPPSFASIFLT |
| | KSTKLTCLVTDLTTYDSVTISWTRQNGEAVKTHTNISESHPNATFSAVGEASICEDDWNSGERFTCTV |
| | THTDLPSPLKQTISRPKGVALHRPDVYLLPPAREQLNLRESATITCLVTGFSPADVFVQWMQRGQPLS |
| | PEKYVTSAPMPEPQAPGRYFAHSILTVSEEEWNTGETYTCVVAHEALPNRVTERTVDKSTGKPTLYNV |
| | SLVMSDTAGTCY |
| | (GS Linker-b2m-GS linker-HLA A2-IgM2-4) |
| 261 | GSHSMRYFFTSVSRPGRGEPRFIAVGYVDDTQFVRFDSDAASRRMEPRAPWIEQEGPEYWDGETRKVK |
| | AHSQTHRVDLGTLRGYYNQSEAGSHTLQRMYGCDVGSDWRFLRGYHQYAYDGKDYIALKEDLRSWTAA |
| | DMAAQTTKHKWEAAHVAEQWRAYLEGTCVEWLRRYLENGKETLQRTDAPKTHMTHHAVSDHEATLRCW |
| | ALSFYPAEITLTWQRDGEDQTQDTELVETRPAGDGTFQKWAAVVVPSGQEQRYTCHVQHEGLPKPLTL |
| | RWEPSS |
| | HLA-A*02:02 |
| 262 | GSHSMRYFYTSVSRPGRGEPRFIAVGYVDDTQFVRFDSDAASQRMEPRAPWIEQEGPEYWDGETRKVK |
| | AHSQTHRVDLGTLRGYYNQSEAGSHTVQRMYGCDVGSDWRFLRGYHQYAYDGKDYIALKEDLRSWTAA |
| | DMAAQTTKHKWEAAHVAEQLRAYLEGTCVEWLRRYLENGKETLQRTDAPKTHMTHHAVSDHEATLRCW |
| | ALSFYPAEITLTWQRDGEDQTQDTELVETRPAGDGTFQKWAAVVVPSGQEQRYTCHVQHEGLPKPLTL |
| | RWEPSS |
| | HLA-A*02:06 |
| 263 | GSHSMRYFYTSVSRPGRGEPRFIAVGYVDDTQFVRFDSDAASQRMEPRAPWIEQEGPEYWDRNTRNVK |
| | AHSQTDRVDLGTLRGYYNQSEAGSHTIQMMYGCDVGSDGRFLRGYRQDAYDGKDYIALKEDLRSWTAA |
| | DMAAQTTKHKWEAAHVAEQWRAYLEGTCVEWLRRYLENGKETLQRTDAPKTHMTHHAVSDHEATLRCW |
| | ALSFYPAEITLTWQRDGEDQTQDTELVETRPAGDGTFQKWVAVVVPSGQEQRYTCHVQHEGLPKPLTL |
| | RWEPSS |
| | HLA-A*68:03 |
| 264 | GSHSMRYFYTAVSRPGRGEPRFIAVGYVDDTQFVQFDSDAASPRGEPRAPWVEQEGPEYWDRETQKYK |
| | RQAQTDRVSLRNLRGYYNQSEAGSHTLQRMYGCDLGPDGRLLRGYNQFAYDGKDYIALNEDLRSWTAA |
| | DTAAQITQRKWEAARTAEQLRAYLEGTCVEWLRRYLENGKKTLQRAEHPKTHVTHHPVSDHEATLRCW |
| | ALGFYPAEITLTWQRDGEDQTQDTELVETRPAGDGTFQKWAAVVVPSGEEQRYTCHVQHEGLPEPLTL |
| | RWGPSS |
| | HLA-C*08:01 |
| 265 | GDTRPRFLEQVKHECHFFNGTERVRFLDRYFYHQEEYVRFDSDVGEYRAVTELGRPDAEYWNSQKDLL |
| | EQRRAEVDTYCRHNYGVVESFTVQRRVYPEVTVYPAKTQPLQHHNLLVCSVNGFYPGSIEVRWFRNGQ |
| | EEKTGVVSTGLIQNGDWTFQTLVMLETVPRSGEVYTCQVEHPSLTSPLTVEWRARSESAQSK |
| | HLA-DRB1*04:03 |
| 266 | GDTRPRFLEQVKHECHFFNGTERVRFLDRYFYHQEEYVRFDSDVGEYRAVTELGRPDAEYWNSQKDLL |
| | EQRRAEVDTYCRHNYGVGESFTVQRRVYPEVTVYPAKTQPLQHHNLLVCSVNGFYPGSIEVRWFRNGQ |
| | EEKTGVVSTGLIQNGDWTFQTLVMLETVPRSGEVYTCQVEHPSLTSPLTVEWRARSESAQSK |
| | HLA-DRB1*04:07 |
| 267 | GDTRPRFLEYSTGECYFFNGTERVRFLDRYFYNQEEYVRFDSDVGEYRAVTELGRPDAEYWNSQKDFL |
| | EDRRALVDTYCRHNYGVGESFTVQRRVHPKVTVYPSKTQPLQHHNLLVCSVSGFYPGSIEVRWFRNGQ |
| | EEKTGVVSTGLIHNGDWTFQTLVMLETVPRSGEVYTCQVEHPSVTSPLTVEWSARSESAQSK |
| | HLA-DRB1*08:02 |
| 268 | GDTQPRFLKQDKFECHFFNGTERVRYLHRGIYNQEENVRFDSDVGEYRAVTELGRPVAESWNSQKDFL |
| | ERRRAEVDTVCRHNYGVGESFTVQRRVHPEVTVYPAKTQPLQHHNLLVCSVSGFYPGSIEVRWFRNGQ |
| | EEKAGVVSTGLIQNGDWTFQTLVMLETVPRSGEVYTCQVEHPSVMSPLTVEWRARSESAQSK |
| | HLA-DRB1*09:01 |
| 269 | GDTRPRFLEYSTGECYFFNGTERVRLLERHFHNQEELLRFDSDVGEFRAVTELGRPVAESWNSQKDIL |
| | EDRRAAVDTYCRHNYGAVESFTVQRRVHPKVTVYPSKTQPLQHHNLLVCSVSGFYPGSIEVRWFRNGQ |
| | EEKTGVVSTGLIHNGDWTFQTLVMLETVPRSGEVYTCQVEHPSVTSPLTVEWRARSESAQSK |
| | HLA-DRB1*12:01 |
| 270 | GDTRPRFLEYSTSECHFFNGTERVRFLDRYFYNQEEYVRFDSDVGEYRAVTELGRPSAEYWNSQKDIL |
| | EDKRAAVDTYCRHNYGVGESFTVQRRVHPKVTVYPSKTQPLQHHNLLVCSVSGFYPGSIEVRWFRNGQ |
| | EEKTGVVSTGLIHNGDWTFQTLVMLETVPRSGEVYTCQVEHPSVTSPLTVEWRARSESAQSK |
| | HLA-DRB1*13:03 |
| 271 | GDTRPRFLWQPKRECHFFNGTERVRFLDRYFYNQEESVRFDSDVGEFRAVTELGRPDAEYWNSQKDIL |
| | EQARAAVDTYCRHNYGVGESFTVQRRVQPKVTVYPSKTQPLQHHNLLVCSVSGFYPGSIEVRWFLNGQ |
| | EEKAGMVSTGLIQNGDWTFQTLVMLETVPRSGEVYTCQVEHPSVTSPLTVEWRARSESAQSK |
| | HLA-DRB1*15:02 |
| 272 | GDTRPRFLQQDKYECHFFNGTERVRFLHRDIYNQEEDLRFDSDVGEYRAVTELGRPDAEYWNSQKDFL |
| | EDRRAAVDTYCRHNYGVGESFTVQRRVEPKVTVYPARTQTLQHHNLLVCSVNGFYPGSIEVRWFRNSQ |
| | EEKAGVVSTGLIQNGDWTFQTLVMLETVPRSGEVYTCQVEHPSVTSPLTVEWRAQSESAQSK |
| | HLA-DRB5*01:01 |
| 273 | IKADHVSTYAAFVQTHRPTGEFMFEFDEDEMFYVDLDKKETVWHLEEFGQAFSFEAQGGLANIAILNN |
| | NLNTLIQRSNHTQATNDPPEVTVFPKEPVELGQPNTLICHIDKFFPPVLNVTWLCNGELVTEGVAESL |
| | FLPRTDYSFHKFHYLTFVPSAEDFYDCRVEHWGLDQPLLKHWEAQEPIQMPETTE |
| | HLA-DPA1*01:03 |
| 274 | GRATPENYLFQGRQECYAFNGTQRFLERYIYNREEFARFDSDVGEFRAVTELGRPAAEYWNSQKDILE |
| | EKRAVPDRMCRHNYELGGPMTLQRRVQPRVNVSPSKKGPLQHHNLLVCHVTDFYPGSIQVRWFLNGQE |
| | ETAGVVSTNLIRNGDWTFQILVMLEMTPQQGDVYTCQVEHTSLDSPVTVEEWKAQSDSARSK |
| | HLA-DPB1*04:01 |
| 275 | QEDERIVLVDNKCKCARITSRIIRSSEDPNEDIVERNIRIIVPLNNRENISDPTSPLRTRFVYHLSDL |
| | CKKCDPTEVELDNQIVTATQSNICDEDSATETCYTYDRNKCYTAVVPLVYGGETKMVETALTPDACYP |
| | DGGGGSGGGGSGGGGSQVQLQQSGAELARPGASVKMSCKASGYTFTRYTMHWVKQRPGQGLEWIGYIN |
| | PSRGYTNYNQKFKDKATLTTDKSSSTAYMQLSSLTSEDSAVYYCARYYDDHYSLDYWGQGTTLTVSSG |
| | GGGSGGGGSGGGGSQIVLTQSPAIMSASPGEKVTMTCSASSSVSYMNWYQQKSGTSPKRWIYDTSKLA |
| | SGVPAHFRGSGSGTSYSLTISGMEAEDAATYYCQQWSSNPFTFGSGTKLEIKGGGGSDYKDDDDKHHH |
| | HHH |
| | (J-chain-Linker-anti-CD3scFv-Flag-His) |

1. A multimer comprising a Major Histocompatibility Complex (MHC) moiety operatively linked to a multimerization moiety, wherein:
(a) the MHC moiety comprises an MHC molecule optionally bound with a cognate peptide; and
(b) the multimerization moiety comprises (i) an IgM Cμ4 constant region and a tailpiece region; or (ii) an IgA Cα3 constant region and a tailpiece region, wherein the tailpiece region in (b)(i) or (b)(ii) is an IgM tailpiece region or an IgA tailpiece region.

2. The multimer of claim 1, wherein the MHC moiety comprises (i) an MHC class I molecule, optionally bound with an MHC Class I binding peptide; or (ii) an MHC class II molecule, optionally bound with an MHC Class II binding peptide.

3. The multimer of claim 1 or 2, wherein the multimerization moiety comprises an IgM Cμ4 constant region and an IgM tailpiece region and further comprises an IgM Cμ3 constant region.

4. The multimer of claim 1 or claim 2, wherein the multimerization moiety comprises an IgM Cμ4 constant region and an IgM tailpiece region and further comprises an IgM Cμ2 constant region.

5. The multimer of claim 1 or claim 2, wherein the multimerization moiety comprises an IgM Cμ4 constant region and an IgM tailpiece region and further comprises an IgM Cμ1 constant region.

6. The multimer of claim 1 or claim 2, wherein the multimerization moiety comprises an IgM Cμ4 constant region and an IgM tailpiece region and further comprises IgM Cμ2 and Cμ3 constant regions.

7. The multimer of claim 1 or claim 2, wherein the multimerization moiety comprises an IgM Cμ4 constant region and an IgM tailpiece region and further comprises IgM Cμ1 and Cμ3 constant regions.

8. The multimer of claim 1 or claim 2, wherein the multimerization moiety comprises an IgM Cμ4 constant region and an IgM tailpiece region and further comprises IgM Cμ1 and Cμ2 constant regions.

9. The multimer of claim 1 or claim 2, wherein the multimerization moiety comprises an IgM Cμ4 constant region and an IgM tailpiece region and further comprises IgM Cμ1, Cμ2 and Cμ3 constant regions.

10. The multimer of claim 1 or claim 2, wherein the multimerization moiety comprises an IgA Cα3 constant region and an IgA tailpiece region and further comprises an IgA Cα2 constant region.

11. The multimer of claim 1 or claim 2, wherein the multimerization moiety comprises an IgA Cα3 constant region and an IgA tailpiece region and further comprises an IgA Cal constant region.

12. The multimer of claim 1 or claim 2, wherein the multimerization moiety comprises an IgA Cα3 constant region and an IgA tailpiece region and further comprises IgA Cal and Cα2 constant regions.

13. A multimer comprising a Major Histocompatibility Complex (MHC) moiety operatively linked to a multimerization moiety, wherein:
(a) the MHC moiety comprises (i) an MHC Class I molecule, optionally bound with an MHC Class I-binding peptide; or (ii) an MHC Class II molecule, optionally bound with an MHC Class II-binding peptide; and
(b) the multimerization moiety comprises an IgM tailpiece region or an IgA tailpiece region.

14. The multimer of claim 12, wherein the multimerization moiety comprises an IgM tailpiece region.

15. The multimer of claim 12, wherein the multimerization moiety comprises an IgA tailpiece region.

16. The multimer of any one of claims 1-15, wherein the MHC moiety comprises an MHC Class I molecule bound with an MHC Class I-binding peptide.

17. The multimer of any one of claims 1-16, wherein the MHC moiety is operatively linked to the multimerization moiety through an MHC Class I α chain.

18. The multimer of claim 16 or 17, wherein the MHC moiety is in a single polypeptide comprising, from the N-terminus to the C-terminus, the MHC Class I-binding peptide, a first linker, a β2M chain, a second linker, and an MHC Class I α chain, wherein the MHC Class I α chain optionally comprises a Y84A substitution.

19. The multimer of claim 18, wherein the MHC Class I α chain comprises a Y84C substitution, and the first linker comprises a cysteine residue, such that a disulfide bond forms between the cysteine residue corresponding to position 84 of the MHC Class I α chain and the cysteine residue of the first linker.

20. The multimer of any one of claims 1-15, wherein the MHC moiety comprises an MHC Class II molecule bound with an MHC Class II-binding peptide.

21. The multimer of any one of claims 1-15 or 20, wherein the MHC moiety is operatively linked to the multimerization moiety through an MHC Class II β chain or an MHC Class II α chain.

22. The multimer of any one of claims 1-15 or 20-21, further comprising a first heterodimerization motif linked to an α chain of the MHC Class II molecule and a second heterodimerization motif linked to a β chain of the MHC Class II molecule, wherein the first and second heterodimerization motifs form a heterodimer.

23. The multimer of claim 22, wherein the first and/or second heterodimerization motifs are linked to the multimerization moiety.

24. The multimer of 22 or 23, wherein the first and/or second heterodimerization motifs comprise a leucine zipper.

25. The multimer of claim 23, wherein the leucine zipper comprises a variant of Fos and Jun.

26. The multimer of any one of claims 1-25, which further comprises an immunoglobulin J chain.

27. The multimer of any one of claims 1-26, wherein the multimer is soluble.

28. The multimer of any one of claims 1-27, wherein the MHC moiety is a single chain molecule.

29. The multimer of any one of claims 1-28, which is a dimer.

30. The multimer of any one of claims 1-28, which is a trimer.

31. The multimer of any one of claims 1-28, which is a tetramer.

32. The multimer of any one of claims 1-28, which is a pentamer.

33. The multimer of any one of claims 1-28, which is a hexamer.

34. The multimer of any one of claims 1-33, wherein the MHC moiety and the multimerization moiety are separated by a linker.

35. The multimer of claim 34, wherein the linker is a flexible linker, a rigid linker or a semi-rigid linker.

36. The multimer of any one of claims 26-35, which further comprises an effector moiety operatively linked to the immunoglobulin J chain.

37. The multimer of any one of claims 1-36, which further comprises an effector moiety, optionally wherein the effector moiety is operatively linked to the multimerization moiety.

38. The multimer of claim 36 or 37, wherein the effector moiety comprises a checkpoint protein agonist.

39. The multimer of claim 38, wherein the checkpoint protein agonist comprises a PD-L1 extracellular domain or domain 1, an anti-PD1 agonist antibody, an anti-CTLA4 agonist antibody, an anti-Lag3 agonist antibody, an anti-TIM3 agonist antibody, an anti-TIGIT agonist antibody, an anti-LILRB1 agonist antibody, an anti-LILRB2 agonist antibody, or any portion or antigen-binding fragment thereof.

40. The multimer of claim 36 or 37, wherein the effector moiety comprises a TNFR family protein agonist.

41. The multimer of claim 40, wherein the TNFR family protein agonist comprises 4-1BBL (CD137L), an anti-CD137 agonist antibody or any portion or antigen-binding fragment thereof, or an anti-TNFR2 agonist antibody or any portion or antigen-binding fragment thereof.

42. The multimer of claim 36 or 37, wherein the effector moiety comprises an anti-inflammatory agent, which, optionally, may comprise an anti-inflammatory cytokine.

43. The multimer of claim 42, wherein the anti-inflammatory agent comprises an extracellular region of HLA-G, an anti-LILRB1 agonist antibody, an anti-LILRB2 agonist antibody, or any fragments or variants thereof or an anti-inflammatory cytokine selected from IL10, TGFβ, or any fragments or variants thereof.

44. The multimer of claim 36 or 37, wherein the effector moiety comprises an immune cell engaging agent.

45. The multimer of claim 44, wherein the immune cell engaging agent comprises an anti-CD3 antibody, an anti-NKp46 antibody, an anti-CD16a antibody, an anti-CD56 antibody, an anti-NKG2D antibody, an anti-NKp30 antibody, an anti-CD64 antibody, or any portion or antigen-binding fragments thereof.

46. The multimer of claim 36 or 37, wherein the effector moiety comprises a cytokine.

47. The multimer of claim 46, wherein the cytokine comprises IL-12. IL-15, or any variants or fragments thereof.

48. The multimer of claim 46, wherein the cytokine comprises IL2, TGFβ, or any variants or fragments thereof.

49. The multimer of claim 48, wherein the IL2 comprises an IL2 mutein that has reduced or no binding affinity for CD25/IL2Rα.

50. The multimer of claim 36 or 37, wherein the effector moiety comprises a cell-death-inducing agent.

51. The multimer of claim 50, wherein the cell-death-inducing agent comprises a tubulin inhibitor, a DNA damaging agent, FasL, anti-Fas agonist antibody or any portion or antigen-binding fragment thereof.

52. The multimer of claim 38 or 39, wherein the effector moiety comprises a PD-1 binding moiety.

53. The multimer of claim 52, wherein the PD-1 binding moiety comprises PD-L1.

54. The multimer of any one of claims 36-53, wherein the effector moiety is attached to the multimer through a linker.

55. The multimer of claim 54, wherein the linker is a flexible linker, a rigid linker or a semi-rigid linker.

56. The multimer of any one of claims 1-55, which further comprises one or more heterologous functional domains.

57. A method of treating an autoimmune disease comprising administering to a subject in need thereof the multimer of any of claims 38-45 and 48-53.

58. A method of treating a cancer comprising administering to a subject in need thereof the multimer of any one of claims 40-41 and 46-47.

59. A composition comprising a mixture, which mixture comprises (i) at least two multimers of any one of claims 1-56; and (ii) wherein the at least two multimers are selected from the group consisting of dimers, trimers, tetramers, pentamers, and hexamers.

60. An isolated nucleic acid or plurality of nucleic acid molecules encoding the multimer or multimers of any one of claims 1-56.

61. An expression vector comprising the one or more isolated nucleic acid molecules of claim 60.

62. An isolated nucleic acid molecule, encoding a Major Histocompatibility Complex (MHC) moiety operatively linked to a multimerization moiety, wherein:
(a) the MHC moiety comprises an MHC molecule and optionally a cognate peptide; and
(b) the multimerization moiety comprises (i) an IgM Cμ4 constant region and a tailpiece region; or (ii) an IgA Cα3 constant region and a tailpiece region, wherein the tailpiece region in (b)(i) or (b)(ii) is an IgM tailpiece region or an IgA tailpiece region.

63. The nucleic acid of claim 62, wherein the MHC moiety comprises (i) an MHC class I molecule and optionally an MHC Class I binding peptide; or (ii) an MHC class II molecule, and an MHC Class II binding peptide.

64. An isolated nucleic acid molecule, encoding a Major Histocompatibility Complex (MHC) moiety and, optionally, an MHC binding peptide, and which MHC moiety is operatively linked to a multimerization moiety, wherein:
(a) the MHC moiety comprises (i) an MHC Class I molecule, and, optionally an MHC Class II binding peptide; or (ii) an MHC Class II molecule and, optionally, an MHC Class II binding peptide; and
(b) the multimerization moiety comprises (i) an IgM Cμ4 constant region and a tailpiece region; or (ii) an IgA Cα3 constant region and a tailpiece region, wherein the tailpiece region in (b)(i) or (b)(ii) is an IgM tailpiece region or an IgA tailpiece region.

65. The isolated nucleic acid molecule of any one of claims 61-64, wherein the multimerization moiety comprises an IgM Cμ4 constant region and an IgM tailpiece region and further comprises an IgM Cμ3 constant region.

66. The isolated nucleic acid molecule of any one of claims 61-64, wherein the multimerization moiety comprises an IgM Cμ4 constant region and an IgM tailpiece region and further comprises an IgM Cμ2 constant region.

67. The isolated nucleic acid molecule of any one of claims 61-64, wherein the multimerization moiety comprises an IgM Cμ4 constant region and an IgM tailpiece region and further comprises an IgM Cμ1 constant region.

68. The isolated nucleic acid molecule of any one of claims 61-64, wherein the multimerization moiety comprises an IgM Cμ4 constant region and an IgM tailpiece region and further comprises IgM Cμ2 and Cμ3 constant regions.

69. The isolated nucleic acid molecule of any one of claims 61-64, wherein the multimerization moiety comprises an IgM Cμ4 constant region and an IgM tailpiece region and further comprises IgM Cμ1 and Cμ3 constant regions.

70. The isolated nucleic acid molecule of any one of claims 61-64, wherein the multimerization moiety comprises an IgM Cμ4 constant region and an IgM tailpiece region and further comprises IgM Cμ1 and Cμ2 constant regions.

71. The isolated nucleic acid molecule of any one of claims 61-64, wherein the multimerization moiety comprises an IgM Cμ4 constant region and an IgM tailpiece region and further comprises IgM Cμ1, Cμ2 and Cμ3 constant regions.

72. The isolated nucleic acid molecule of any one of claims 61-64, wherein the multimerization moiety comprises an IgA Cα3 constant region and an IgA tailpiece region and further comprises an IgA Cα2 constant region.

73. The isolated nucleic acid molecule of any one of claims 61-64, wherein the multimerization moiety comprises an IgA Cα3 constant region and an IgA tailpiece region and further comprises an IgA Cal constant region.

74. The isolated nucleic acid molecule of any one of claims 61-64, wherein the multimerization moiety comprises an IgA Cα3 constant region and an IgA tailpiece region and further comprises IgA Cal and Cα2 constant regions.

75. An isolated nucleic acid molecule encoding a Major Histocompatibility Complex (MHC) moiety and, optionally, an MHC binding peptide, wherein:
(a) the MHC moiety comprises (i) an MHC Class I molecule and, optionally, an MHC Class I binding peptide; or (ii) an MHC Class II molecule and, optionally, an MHC Class II binding peptide; and
(b) the multimerization moiety comprises an IgM tailpiece region or an IgA tailpiece region.

76. The isolated nucleic acid molecule of claim 75, wherein the multimerization moiety comprises an IgM tailpiece region.

77. The isolated nucleic acid molecule of claim 75, wherein the multimerization moiety comprises an IgA tailpiece region.

78. The isolated nucleic acid molecule of any one of claims 62-77, wherein the MHC moiety is operatively linked to the multimerization moiety through an MHC Class I α chain.

79. The isolated nucleic acid molecule of any one of claims 62-77, wherein the MHC moiety is operatively linked to the multimerization moiety through an MHC Class II β chain or an MHC Class II α chain.

80. The isolated nucleic acid molecule of any one of claims 62-79, wherein the MHC moiety and the multimerization moiety are separated by a linker.

81. The isolated nucleic acid molecule of claim 80, wherein the linker is a flexible linker, a rigid linker or a semi-rigid linker.

82. An expression vector comprising the one or more nucleic acid molecules of any one of claims 62-81.

83. A host cell comprising the one or more nucleic acid molecules of any one of claim 60 or 62-81 or the expression vector of claim 61 or 82.

84. The host cell of claim 83, which further comprises a nucleic acid molecule or an expression vector encoding a cognate MHC chain that pairs with the MHC moiety.

85. The host cell of claim 83 or 84, which comprises an expression vector encoding an immunoglobulin J chain and a separate expression vector encoding the multimer.

86. The host cell of any of claims 83-85, wherein, in the expression vector, the immunoglobulin J chain is operatively linked to an effector moiety.

87. The host cell of claim 86, wherein the effector moiety comprises a PD-1 binding moiety.

88. The host cell of claim 87, wherein the PD-1 binding moiety comprises PD-L1.

89. A method of preparing a Major Histocompatibility Complex (MHC) multimer comprising culturing the host cell of any one of claims 83-88.

90. The method of claim 89, further comprising isolating the MHC multimer from the host cells or the host cell culture supernatant.

91. A pharmaceutical composition comprising the multimer of any one of claims 1-38 and a pharmaceutically acceptable carrier.

92. A kit comprising the multimer of any one of claims 1-56 packaged in a container with instructions for use in detecting peptide-MHC-TCR interactions and/or modulating an immune response.

93. A method of detecting binding of a T cell receptor (TCR) to a peptide-MHC complex, the method comprising contacting a TCR with the multimer of any one of claims 1-56 and detecting binding of the TCR to the multimer to thereby detect binding of the TCR to a peptide-MHC complex.

94. The method of claim 93, wherein the multimer comprises a detectable moiety.

95. The method of claim 93, wherein the TCR is on the surface of a T cell and the multimer is contacted with the T cell.

96. A method of modulating an immune response in a subject, the method comprising administering to the subject an effective amount of the multimer of any one of claims 1-38, or the pharmaceutical composition of claim 91, such that an immune response is modulated in the subject.

97. The method of claim 96, wherein the subject has an autoimmune disorder and the immune response to the autoimmune disorder is modulated.

98. The method of claim 96, wherein the subject has an inflammatory disorder and the immune response to the inflammatory disorder is modulated.

99. A method of treating an autoimmune disorder in a subject, the method comprising administering to the subject the multimer of any one of claims 1-56, or the pharmaceutical composition of claim 91, wherein the MHC moiety of the multimer comprises an autoantigen bound to an MHC Class I or Class II molecule.

100. The method of claim 99, wherein the autoimmune disorder is Type I diabetes.

101. The method of claim 99, wherein the autoantigen is an insulin autoantigen.

102. The method of any one of claims 96-101, wherein the subject is further treated with one or more additional therapies.

103. A method of treating an infectious disease in a subject, the method comprising administering to the subject the multimer of any one of claims 1-56, or the pharmaceutical composition of claim 91.

104. The method of claim 103, wherein the infectious disease is a viral infection.

105. Use of the MHC multimer of any one of claims 1-56 in the manufacture of a medicament for treating an autoimmune disorder, inflammatory disorder, infectious disease, or cancer.

106. A method of treating cancer using an immunotherapy comprising administering to a subject diagnosed with cancer the multimer of any one of claims 1-56 or the pharmaceutical composition of claim 91.

107. The method of claim 106, wherein the subject is further treated with one or more additional therapies.

The application's sequence listing, which the Patent Office published only in electronic form, follows.

SEQUENCE LISTING (283 sequences)

SEQ ID NO: 1 - protein, 784 aa, Artificial Sequence
  Description of Artificial Sequence: Synthetic polypeptide
NLVPMVATVGGGGSGGGGSGGGGSIQRTPKIQVYSRHPAENGKSNFLNCYVSGFHPSDIEVDLLKNGERIEKVEHSDLSFSKDWSFYLLYYTEFTPTEKDEYACRVNHVTLSQPKIVKWDRDMGGGGSGGGGSGGGGSGGGGSGSHSMRYFFTSVSRPGRGEPRFIAVGYVDDTQFVRFDSDAASQRMEPRAPWIEQEGPEYWDGETRKVKAHSQTHRVDLGTLRGAYNQSEAGSHTVQRMYGCDVGSDWRFLRGYHQYAYDGKDYIALKEDLRSWTAADMAAQTTKHKWEAAHVAEQLRAYLEGTCVEWLRRYLENGKETLQRTDAPKTHMTHHAVSDHEATLRCWALSFYPAEITLTWQRDGEDQTQDTELVETRPAGDGTFQKWAAVVVPSGQEQRYTCHVQHEGLPKPLTLRWEPSSGGGGSGGGGSGGGGSIAELPPKVSVFVPPRDGFFGNPRKSKLICQATGFSPRQIQVSWLREGKQVGSGVTTDQVQAEAKESGPTTYKVTSTLTIKESDWLGQSMFTCRVDHRGLTFQQNASSMCVPDQDTAIRVFAIPPSFASIFLTKSTKLTCLVTDLTTYDSVTISWTRQNGEAVKTHTNISESHPNATFSAVGEASICEDDWNSGERFTCTVTHTDLPSPLKQTISRPKGVALHRPDVYLLPPAREQLNLRESATITCLVTGFSPADVFVQWMQRGQPLSPEKYVTSAPMPEPQAPGRYFAHSILTVSEEEWNTGETYTCVVAHEALPNRVTERTVDKSTGKPTLYNVSLVMSDTAGTCY

SEQ ID NO: 2 - DNA, 2352 bp, Artificial Sequence
  Description of Artificial Sequence: Synthetic polynucleotide
aaccttgtgcctatggtcgccacagtgggtggtggcggctccggaggcggtggctccggcggcggcggcagtattcaaagaacccccaagatccaggtttattctcgccatcccgctgagaacggtaaatctaatttccttaactgctacgtttcaggcttccatccaagcgacatcgaagtagatctgctcaaaaatggggagagaatcgagaaggtagagcacagtgacctaagtttcagtaaagactggtccttctacctgctctactacactgagttcacccccacagagaaggacgaatatgcatgtcgggtcaatcacgtcaccttgtctcaacctaagatcgtgaaatgggatcgggatatggggggtggcggctcaggcggtggaggctcaggcgggggaggatctggaggcggcggtagcggctcacactctatgaggtatttttttacctcagtgagcaggccaggcagaggtgaacccagattcattgcagttggttacgttgatgatacccagttcgtccgctttgattctgacgccgcatcacagaggatggaacctagggcaccttggatagaacaggaaggcccagagtattgggatggcgagactagaaaagtgaaggctcatagccagacacatcgagtagacctgggaactctccgtggagcatataaccagtccgaggctggctcccatacagtgcagaggatgtacggatgcgacgtgggcagcgattggcgttttctacgaggttaccatcagtacgcatacgatggaaaagactatattgcactcaaggaggacctccgaagctggaccgcagctgatatggctgcacagactaccaaacataagtgggaggcagctcatgttgcagagcaactacgggcatacctcgaagggacttgtgtggagtggctgagaaggtacctagagaacgggaaggagaccctgcagcggacagacgccccaaagacccatatgacccaccacgctgtcagtgatcatgaagccacattgcgctgctgggcacttagtttctatcccgcagaaatcaccttgacctggcagcgtgacggcgaagatcagacccaggacaccgagcttgtggaaacaagacctgccggagatggaaccttccagaagtgggccgctgtggtcgttcccagcggccaggagcagcggtatacttgtcatgtccaacatgagggactgccaaaacccctcacccttaggtgggagcctagttccggtggcggaggctccggagggggcggaagcggaggtggtggatccatcgcagaactgccacctaaagtcagcgtctttgtgcctccccgtgatggcttttttggcaacccccggaagagtaaactaatatgccaggccacaggatttagtccgcggcagattcaggtgtcttggctccgggagggaaaacaggtcggaagtggagtgaccacagaccaagtgcaggccgaggctaaggagagtggtcctacaacttacaaggttacaagtaccttgacaattaaagagtccgattggctgggacagagtatgtttacatgtagagtggaccaccgtggtctcactttccagcagaatgctagttcaatgtgcgttccggatcaggataccgcaattagagtgttcgccatccctccctcttttgcttccatcttcctgaccaagagcaccaagcttacatgcttggttaccgatcttacaacctatgattctgtcactatctcctggacacgccagaacggggaggccgtgaagacacatactaatatcagcgagagccatcccaacgctacattctcagcagtgggcgaggcctctatctgcgaagacgactggaattcaggggaacggttcacgtgtactgtcacccatacagatctgccttcccctcttaagcagaccatttcacgaccgaaaggggtggctcttcaccggcccgacgtgtacctactcccacctgcccgtgaacaactgaatctgcgcgagagcgctaccattacctgcctggtaaccggatttagtcctgcagacgtctttgttcagtggatgcaacgcggccagcccctctcccctgagaagtatgtgactagtgcccctatgcccgaaccccaggctcctggcagatattttgcccatagcatcctgacagtatcagaagaggagtggaacactggtgaaacctatacttgcgtggtggcacacgaggctttgccgaaccgcgtcacagaacgaaccgttgacaaaagcacaggtaagcccaccctgtacaatgtcagcctcgtaatgtctgatacagcaggtacctgttat

SEQ ID NO: 3 - protein, 668 aa, Artificial Sequence
  Description of Artificial Sequence: Synthetic polypeptide
NLVPMVATVGGGGSGGGGSGGGGSIQRTPKIQVYSRHPAENGKSNFLNCYVSGFHPSDIEVDLLKNGERIEKVEHSDLSFSKDWSFYLLYYTEFTPTEKDEYACRVNHVTLSQPKIVKWDRDMGGGGSGGGGSGGGGSGGGGSGSHSMRYFFTSVSRPGRGEPRFIAVGYVDDTQFVRFDSDAASQRMEPRAPWIEQEGPEYWDGETRKVKAHSQTHRVDLGTLRGAYNQSEAGSHTVQRMYGCDVGSDWRFLRGYHQYAYDGKDYIALKEDLRSWTAADMAAQTTKHKWEAAHVAEQLRAYLEGTCVEWLRRYLENGKETLQRTDAPKTHMTHHAVSDHEATLRCWALSFYPAEITLTWQRDGEDQTQDTELVETRPAGDGTFQKWAAVVVPSGQEQRYTCHVQHEGLPKPLTLRWEPSSGGGGSGGGGSGGGGSIRVFAIPPSFASIFLTKSTKLTCLVTDLTTYDSVTISWTRQNGEAVKTHTNISESHPNATFSAVGEASICEDDWNSGERFTCTVTHTDLPSPLKQTISRPKGVALHRPDVYLLPPAREQLNLRESATITCLVTGFSPADVFVQWMQRGQPLSPEKYVTSAPMPEPQAPGRYFAHSILTVSEEEWNTGETYTCVVAHEALPNRVTERTVDKSTGKPTLYNVSLVMSDTAGTCY

SEQ ID NO: 4 - DNA, 2004 bp, Artificial Sequence
  Description of Artificial Sequence: Synthetic polynucleotide
aaccttgtgcctatggtcgccacagtgggtggtggcggctccggaggcggtggctccggcggcggcggcagtattcaaagaacccccaagatccaggtttattctcgccatcccgctgagaacggtaaatctaatttccttaactgctacgtttcaggcttccatccaagcgacatcgaagtagatctgctcaaaaatggggagagaatcgagaaggtagagcacagtgacctaagtttcagtaaagactggtccttctacctgctctactacactgagttcacccccacagagaaggacgaatatgcatgtcgggtcaatcacgtcaccttgtctcaacctaagatcgtgaaatgggatcgggatatggggggtggcggctcaggcggtggaggctcaggcgggggaggatctggaggcggcggtagcggctcacactctatgaggtatttttttacctcagtgagcaggccaggcagaggtgaacccagattcattgcagttggttacgttgatgatacccagttcgtccgctttgattctgacgccgcatcacagaggatggaacctagggcaccttggatagaacaggaaggcccagagtattgggatggcgagactagaaaagtgaaggctcatagccagacacatcgagtagacctgggaactctccgtggagcatataaccagtccgaggctggctcccatacagtgcagaggatgtacggatgcgacgtgggcagcgattggcgttttctacgaggttaccatcagtacgcatacgatggaaaagactatattgcactcaaggaggacctccgaagctggaccgcagctgatatggctgcacagactaccaaacataagtgggaggcagctcatgttgcagagcaactacgggcatacctcgaagggacttgtgtggagtggctgagaaggtacctagagaacgggaaggagaccctgcagcggacagacgccccaaagacccatatgacccaccacgctgtcagtgatcatgaagccacattgcgctgctgggcacttagtttctatcccgcagaaatcaccttgacctggcagcgtgacggcgaagatcagacccaggacaccgagcttgtggaaacaagacctgccggagatggaaccttccagaagtgggccgctgtggtcgttcccagcggccaggagcagcggtatacttgtcatgtccaacatgagggactgccaaaacccctcacccttaggtgggagcctagttccggtggcggaggctccggagggggcggaagcggaggtggtggatccatccgagtattcgctatcccacccagtttcgcctctatcttccttaccaaatctactaaactgacatgcttggtcactgatctaaccacttacgattctgtgacaatttcctggacaaggcagaacggagaggcagtaaagactcatacgaatatttcagaatcccatcccaacgccacgttttccgccgttggcgaggcctccatttgtgaggacgattggaatagcggagagcgctttacctgcacagtgacgcatacagatctgcctagcccactcaagcagactatctctcgcccaaagggggtggctctgcataggcctgacgtatatctccttccacccgctcgagagcagctgaacttgagagaatccgcaactattacttgcttggtgacgggcttttctcccgccgatgtcttcgtgcagtggatgcagcgtggacagcctctctctcctgagaaatacgtaacatctgcccccatgcccgagcctcaggctcctggtcgttattttgctcacagtatcctgaccgtcagcgaagaggaatggaacactggagagacctacacctgtgtcgtggctcatgaagctctgcctaacagggtcaccgagcgcaccgtggacaaaagcactggcaaaccgaccctgtataacgtgtcactcgtgatgagcgacacagccggcacttgctat

SEQ ID NO: 5 - protein, 785 aa, Artificial Sequence
  Description of Artificial Sequence: Synthetic polypeptide
ELAGIGILTVGGGGSGGGGSGGGGSIQRTPKIQVYSRHPAENGKSNFLNCYVSGFHPSDIEVDLLKNGERIEKVEHSDLSFSKDWSFYLLYYTEFTPTEKDEYACRVNHVTLSQPKIVKWDRDMGGGGSGGGGSGGGGSGGGGSGSHSMRYFFTSVSRPGRGEPRFIAVGYVDDTQFVRFDSDAASQRMEPRAPWIEQEGPEYWDGETRKVKAHSQTHRVDLGTLRGAYNQSEAGSHTVQRMYGCDVGSDWRFLRGYHQYAYDGKDYIALKEDLRSWTAADMAAQTTKHKWEAAHVAEQLRAYLEGTCVEWLRRYLENGKETLQRTDAPKTHMTHHAVSDHEATLRCWALSFYPAEITLTWQRDGEDQTQDTELVETRPAGDGTFQKWAAVVVPSGQEQRYTCHVQHEGLPKPLTLRWEPSSGGGGSGGGGSGGGGSIAELPPKVSVFVPPRDGFFGNPRKSKLICQATGFSPRQIQVSWLREGKQVGSGVTTDQVQAEAKESGPTTYKVTSTLTIKESDWLGQSMFTCRVDHRGLTFQQNASSMCVPDQDTAIRVFAIPPSFASIFLTKSTKLTCLVTDLTTYDSVTISWTRQNGEAVKTHTNISESHPNATFSAVGEASICEDDWNSGERFTCTVTHTDLPSPLKQTISRPKGVALHRPDVYLLPPAREQLNLRESATITCLVTGFSPADVFVQWMQRGQPLSPEKYVTSAPMPEPQAPGRYFAHSILTVSEEEWNTGETYTCVVAHEALPNRVTERTVDKSTGKPTLYNVSLVMSDTAGTCY

SEQ ID NO: 6 - protein, 669 aa, Artificial Sequence
  Description of Artificial Sequence: Synthetic polypeptide
ELAGIGILTVGGGGSGGGGSGGGGSIQRTPKIQVYSRHPAENGKSNFLNCYVSGFHPSDIEVDLLKNGERIEKVEHSDLSFSKDWSFYLLYYTEFTPTEKDEYACRVNHVTLSQPKIVKWDRDMGGGGSGGGGSGGGGSGGGGSGSHSMRYFFTSVSRPGRGEPRFIAVGYVDDTQFVRFDSDAASQRMEPRAPWIEQEGPEYWDGETRKVKAHSQTHRVDLGTLRGAYNQSEAGSHTVQRMYGCDVGSDWRFLRGYHQYAYDGKDYIALKEDLRSWTAADMAAQTTKHKWEAAHVAEQLRAYLEGTCVEWLRRYLENGKETLQRTDAPKTHMTHHAVSDHEATLRCWALSFYPAEITLTWQRDGEDQTQDTELVETRPAGDGTFQKWAAVVVPSGQEQRYTCHVQHEGLPKPLTLRWEPSSGGGGSGGGGSGGGGSIRVFAIPPSFASIFLTKSTKLTCLVTDLTTYDSVTISWTRQNGEAVKTHTNISESHPNATFSAVGEASICEDDWNSGERFTCTVTHTDLPSPLKQTISRPKGVALHRPDVYLLPPAREQLNLRESATITCLVTGFSPADVFVQWMQRGQPLSPEKYVTSAPMPEPQAPGRYFAHSILTVSEEEWNTGETYTCVVAHEALPNRVTERTVDKSTGKPTLYNVSLVMSDTAGTCY

SEQ ID NO: 7 - DNA, 2001 bp, Artificial Sequence
  Description of Artificial Sequence: Synthetic polynucleotide
aaccttgtgcctatggtcgccacagtgggtggtggcggctccggaggcggtggctccggcggcggcggcagtattcaaagaacccccaagatccaggtttattctcgccatcccgctgagaacggtaaatctaatttccttaactgctacgtttcaggcttccatccaagcgacatcgaagtagatctgctcaaaaatggggagagaatcgagaaggtagagcacagtgacctaagtttcagtaaagactggtccttctacctgctctactacactgagttcacccccacagagaaggacgaatatgcatgtcgggtcaatcacgtcaccttgtctcaacctaagatcgtgaaatgggatcgggatatggggggtggcggctcaggcggtggaggctcaggcgggggaggatctggaggcggcggtagcggctcacactctatgaggtatttttttacctcagtgagcaggccaggcagaggtgaacccagattcattgcagttggttacgttgatgatacccagttcgtccgctttgattctgacgccgcatcacagaggatggaacctagggcaccttggatagaacaggaaggcccagagtattgggatggcgagactagaaaagtgaaggctcatagccagacacatcgagtagacctgggaactctccgtggagcatataaccagtccgaggctggctcccatacagtgcagaggatgtacggatgcgacgtgggcagcgattggcgttttctacgaggttaccatcagtacgcatacgatggaaaagactatattgcactcaaggaggacctccgaagctggaccgcagctgatatggctgcacagactaccaaacataagtgggaggcagctcatgttgcagagcaactacgggcatacctcgaagggacttgtgtggagtggctgagaaggtacctagagaacgggaaggagaccctgcagcggacagacgccccaaagacccatatgacccaccacgctgtcagtgatcatgaagccacattgcgctgctgggcacttagtttctatcccgcagaaatcaccttgacctggcagcgtgacggcgaagatcagacccaggacaccgagcttgtggaaacaagacctgccggagatggaaccttccagaagtgggccgctgtggtcgttcccagcggccaggagcagcggtatacttgtcatgtccaacatgagggactgccaaaacccctcacccttaggtgggagcctagttccggtggcggaggctccggagggggcggaagcggaggtggtggatcctgccatccgaggctcagccttcacaggcctgcattggaagacctgctacttggttccgaagccaatctgacctgtactcttacaggcttgcgcgacgcttctggggtcacgttcacctggacaccttctagcggaaaatcagccgtacaagggccccctgagagagacttgtgtggctgttatagtgtctccagcgttttgcctggttgtgcagagccttggaatcatgggaaaaccttcacttgcacagctgcatatcccgagagtaagactccactcacggcaaccctgagtaaatccggcaacacattccgcccagaggtacatcttctgccacccccttctgaagaattggcattgaacgaactcgtcaccctcacctgtctggctcgtggctttagtccaaaggacgtactggtgcgatggctgcaagggtcccaagagctcccaagggagaagtacctcacttgggctagtagacaggaaccatcccaaggtacgacaacattcgccgtcacatccatcctgcgcgtcgctgccgaagactggaagaagggagacaccttttcatgcatggtcggacatgaggcactcccactggctttcactcaaaagaccattgatagactcgccggtaaaccaactcacgtaaacgtgtccgtcgtgatggcagaggtggatggtacctgctat

SEQ ID NO: 8 - protein, 667 aa, Artificial Sequence
  Description of Artificial Sequence: Synthetic polypeptide
NLVPMVATVGGGGSGGGGSGGGGSIQRTPKIQVYSRHPAENGKSNFLNCYVSGFHPSDIEVDLLKNGERIEKVEHSDLSFSKDWSFYLLYYTEFTPTEKDEYACRVNHVTLSQPKIVKWDRDMGGGGSGGGGSGGGGSGGGGSGSHSMRYFFTSVSRPGRGEPRFIAVGYVDDTQFVRFDSDAASQRMEPRAPWIEQEGPEYWDGETRKVKAHSQTHRVDLGTLRGAYNQSEAGSHTVQRMYGCDVGSDWRFLRGYHQYAYDGKDYIALKEDLRSWTAADMAAQTTKHKWEAAHVAEQLRAYLEGTCVEWLRRYLENGKETLQRTDAPKTHMTHHAVSDHEATLRCWALSFYPAEITLTWQRDGEDQTQDTELVETRPAGDGTFQKWAAVVVPSGQEQRYTCHVQHEGLPKPLTLRWEPSSGGGGSGGGGSGGGGSCHPRLSLHRPALEDLLLGSEANLTCTLTGLRDASGVTFTWTPSSGKSAVQGPPERDLCGCYSVSSVLPGCAEPWNHGKTFTCTAAYPESKTPLTATLSKSGNTFRPEVHLLPPPSEELALNELVTLTCLARGFSPKDVLVRWLQGSQELPREKYLTWASRQEPSQGTTTFAVTSILRVAAEDWKKGDTFSCMVGHEALPLAFTQKTIDRLAGKPTHVNVSVVMAEVDGTCY

SEQ ID NO: 9 - protein, 667 aa, Artificial Sequence
  Description of Artificial Sequence: Synthetic polypeptide
NLVPMVATVGGGGSGGGGSGGGGSIQRTPKIQVYSRHPAENGKSNFLNCYVSGFHPSDIEVDLLKNGERIEKVEHSDLSFSKDWSFYLLYYTEFTPTEKDEYACRVNHVTLSQPKIVKWDRDMGGGGSGGGGSGGGGSGGGGSGSHSMRYFFTSVSRPGRGEPRFIAVGYVDDTQFVRFDSDAASQRMEPRAPWIEQEGPEYWDGETRKVKAHSQTHRVDLGTLRGAYNQSEAGSHTVQRMYGCDVGSDWRFLRGYHQYAYDGKDYIALKEDLRSWTAADMAAQTTKHKWEAAHVAEQLRAYLEGTCVEWLRRYLENGKETLQRTDAPKTHMTHHAVSDHEATLRCWALSFYPAEITLTWQRDGEDQTQDTELVETRPAGDGTFQKWAAVVVPSGQEQRYTCHVQHEGLPKPLTLRWEPSSGGGGSGGGGSGGGGSCHPRLSLHRPALEDLLLGSEANLTCTLTGLRDASGATFTWTPSSGKSAVQGPPERDLCGCYSVSSVLPGCAQPWNHGETFTCTAAHPELKTPLTANITKSGNTFRPEVHLLPPPSEELALNELVTLTCLARGFSPKDVLVRWLQGSQELPREKYLTWASRQEPSQGTTTYAVTSILRVAAEDWKKGETFSCMVGHEALPLAFTQKTIDRMAGKPTHINVSVVMAEADGTCY

SEQ ID NO: 10 - DNA, 2001 bp, Artificial Sequence
  Description of Artificial Sequence: Synthetic polynucleotide
aaccttgtgcctatggtcgccacagtgggtggtggcggctccggaggcggtggctccggcggcggcggcagtattcaaagaacccccaagatccaggtttattctcgccatcccgctgagaacggtaaatctaatttccttaactgctacgtttcaggcttccatccaagcgacatcgaagtagatctgctcaaaaatggggagagaatcgagaaggtagagcacagtgacctaagtttcagtaaagactggtccttctacctgctctactacactgagttcacccccacagagaaggacgaatatgcatgtcgggtcaatcacgtcaccttgtctcaacctaagatcgtgaaatgggatcgggatatggggggtggcggctcaggcggtggaggctcaggcgggggaggatctggaggcggcggtagcggctcacactctatgaggtatttttttacctcagtgagcaggccaggcagaggtgaacccagattcattgcagttggttacgttgatgatacccagttcgtccgctttgattctgacgccgcatcacagaggatggaacctagggcaccttggatagaacaggaaggcccagagtattgggatggcgagactagaaaagtgaaggctcatagccagacacatcgagtagacctgggaactctccgtggagcatataaccagtccgaggctggctcccatacagtgcagaggatgtacggatgcgacgtgggcagcgattggcgttttctacgaggttaccatcagtacgcatacgatggaaaagactatattgcactcaaggaggacctccgaagctggaccgcagctgatatggctgcacagactaccaaacataagtgggaggcagctcatgttgcagagcaactacgggcatacctcgaagggacttgtgtggagtggctgagaaggtacctagagaacgggaaggagaccctgcagcggacagacgccccaaagacccatatgacccaccacgctgtcagtgatcatgaagccacattgcgctgctgggcacttagtttctatcccgcagaaatcaccttgacctggcagcgtgacggcgaagatcagacccaggacaccgagcttgtggaaacaagacctgccggagatggaaccttccagaagtgggccgctgtggtcgttcccagcggccaggagcagcggtatacttgtcatgtccaacatgagggactgccaaaacccctcacccttaggtgggagcctagttccggtggcggaggctccggagggggcggaagcggaggtggtggatcctgtcaccctcgcctgtctctgcatcggccagccctcgaagatctactactgggatcagaagccaatttgacctgtaccctgaccggcctgagagatgccagcggcgcaacatttacttggaccccatcttctggtaaatctgccgtccagggcccgcccgagcgtgacctctgtggctgttacagcgtgagctctgtcttgccgggatgtgctcaaccctggaatcatggagagacgtttacctgcaccgccgcacacccagaactcaaaacacccctgaccgccaatatcaccaaatccggtaacacctttcgaccggaagtgcacctactgccaccaccttctgaagagcttgctttgaatgaactcgtgactttgacatgcctagctaggggtttctcccctaaagacgttctggtaaggtggctccaaggcagccaagagctacctcgagaaaagtatctaacttgggcttctaggcaagagccttcccaagggacaaccacgtatgctgtgacctctatcctgcgagtcgcagcagaagattggaagaagggagagacattttcatgtatggtcggtcatgaagctctcccccttgcatttacacaaaagactattgatagaatggcaggtaagccaactcacataaatgtctctgtcgtgatggctgaggccgacggaacctgttac

SEQ ID NO: 11 - protein, 662 aa, Artificial Sequence
  Description of Artificial Sequence: Synthetic polypeptide
NLVPMVATVGGGGSGGGGSGGGGSIQRTPKIQVYSRHPAENGKSNFLNCYVSGFHPSDIEVDLLKNGERIEKVEHSDLSFSKDWSFYLLYYTEFTPTEKDEYACRVNHVTLSQPKIVKWDRDMGGGGSGGGGSGGGGSGGGGSGSHSMRYFFTSVSRPGRGEPRFIAVGYVDDTQFVRFDSDAASQRMEPRAPWIEQEGPEYWDGETRKVKAHSQTHRVDLGTLRGAYNQSEAGSHTVQRMYGCDVGSDWRFLRGYHQYAYDGKDYIALKEDLRSWTAADMAAQTTKHKWEAAHVAEQLRAYLEGTCVEWLRRYLENGKETLQRTDAPKTHMTHHAVSDHEATLRCWALSFYPAEITLTWQRDGEDQTQDTELVETRPAGDGTFQKWAAVVVPSGQEQRYTCHVQHEGLPKPLTLRWEPSSPCRVPPPPPCCHPRLSLHRPALEDLLLGSEANLTCTLTGLRDASGATFTWTPSSGKSAVQGPPERDLCGCYSVSSVLPGCAQPWNHGETFTCTAAHPELKTPLTANITKSGNTFRPEVHLLPPPSEELALNELVTLTCLARGFSPKDVLVRWLQGSQELPREKYLTWASRQEPSQGTTTYAVTSILRVAAEDWKKGETFSCMVGHEALPLAFTQKTIDRMAGKPTHINVSVVMAEADGTCY

SEQ ID NO: 12 - DNA, 1986 bp, Artificial Sequence
  Description of Artificial Sequence: Synthetic polynucleotide
aaccttgtgcctatggtcgccacagtgggtggtggcggctccggaggcggtggctccggcggcggcggcagtattcaaagaacccccaagatccaggtttattctcgccatcccgctgagaacggtaaatctaatttccttaactgctacgtttcaggcttccatccaagcgacatcgaagtagatctgctcaaaaatggggagagaatcgagaaggtagagcacagtgacctaagtttcagtaaagactggtccttctacctgctctactacactgagttcacccccacagagaaggacgaatatgcatgtcgggtcaatcacgtcaccttgtctcaacctaagatcgtgaaatgggatcgggatatggggggtggcggctcaggcggtggaggctcaggcgggggaggatctggaggcggcggtagcggctcacactctatgaggtatttttttacctcagtgagcaggccaggcagaggtgaacccagattcattgcagttggttacgttgatgatacccagttcgtccgctttgattctgacgccgcatcacagaggatggaacctagggcaccttggatagaacaggaaggcccagagtattgggatggcgagactagaaaagtgaaggctcatagccagacacatcgagtagacctgggaactctccgtggagcatataaccagtccgaggctggctcccatacagtgcagaggatgtacggatgcgacgtgggcagcgattggcgttttctacgaggttaccatcagtacgcatacgatggaaaagactatattgcactcaaggaggacctccgaagctggaccgcagctgatatggctgcacagactaccaaacataagtgggaggcagctcatgttgcagagcaactacgggcatacctcgaagggacttgtgtggagtggctgagaaggtacctagagaacgggaaggagaccctgcagcggacagacgccccaaagacccatatgacccaccacgctgtcagtgatcatgaagccacattgcgctgctgggcacttagtttctatcccgcagaaatcaccttgacctggcagcgtgacggcgaagatcagacccaggacaccgagcttgtggaaacaagacctgccggagatggaaccttccagaagtgggccgctgtggtcgttcccagcggccaggagcagcggtatacttgtcatgtccaacatgagggactgccaaaacccctcacccttaggtgggagcctagttccccatgtcgagttccaccaccaccaccctgctgtcaccctcgcctgtctctgcatcggccagccctcgaagatctactactgggatcagaagccaatttgacctgtaccctgaccggcctgagagatgccagcggcgcaacatttacttggaccccatcttctggtaaatctgccgtccagggcccgcccgagcgtgacctctgtggctgttacagcgtgagctctgtcttgccgggatgtgctcaaccctggaatcatggagagacgtttacctgcaccgccgcacacccagaactcaaaacacccctgaccgccaatatcaccaaatccggtaacacctttcgaccggaagtgcacctactgccaccaccttctgaagagcttgctttgaatgaactcgtgactttgacatgcctagctaggggtttctcccctaaagacgttctggtaaggtggctccaaggcagccaagagctacctcgagaaaagtatctaacttgggcttctaggcaagagccttcccaagggacaaccacgtatgctgtgacctctatcctgcgagtcgcagcagaagattggaagaagggagagacattttcatgtatggtcggtcatgaagctctcccccttgcatttacacaaaagactattgatagaatggcaggtaagccaactcacataaatgtctctgtcgtgatggctgaggccgacggaacctgttac

SEQ ID NO: 13 - protein, 191 aa, Unknown
  Description of Unknown: DRA1 01 soluble sequence
IKEEHVIIQAEFYLNPDQSGEFMFDFDGDEIFHVDMAKKETVWRLEEFGRFASFEAQGALANIAVDKANLEIMTKRSNYTPITNVPPEVTVLTNSPVELREPNVLICFIDKFTPPVVNVTWLRNGKPVTTGVSETVFLPREDHLFRKFHYLPFLPSTEDVYDCRVEHWGLDEPLLKHWEFDAPSPLPETTE

SEQ ID NO: 14 - protein, 589 aa, Artificial Sequence
  Description of Artificial Sequence: Synthetic polypeptide
PKYVKQNTLKLATGGGGSGGGGSGGGGSGDTRPRFLWQLKFECHFFNGTERVRLLERCIYNQEESVRFDSDVGEYRAVTELGRPDAEYWNSQKDLLEQRRAAVDTYCRHNYGVGESFTVQRRVEPKVTVYPSKTQPLQHHNLLVCSVSGFYPGSIEVRWFRNGQEEKAGVVSTGLIQNGDWTFQTLVMLETVPRSGEVYTCQVEHPSVTSPLTVEWRARSESAQSKGGGGSGGGGSGGGGSIAELPPKVSVFVPPRDGFFGNPRKSKLICQATGFSPRQIQVSWLREGKQVGSGVTTDQVQAEAKESGPTTYKVTSTLTIKESDWLGQSMFTCRVDHRGLTFQQNASSMCVPDQDTAIRVFAIPPSFASIFLTKSTKLTCLVTDLTTYDSVTISWTRQNGEAVKTHTNISESHPNATFSAVGEASICEDDWNSGERFTCTVTHTDLPSPLKQTISRPKGVALHRPDVYLLPPAREQLNLRESATITCLVTGFSPADVFVQWMQRGQPLSPEKYVTSAPMPEPQAPGRYFAHSILTVSEEEWNTGETYTCVVAHEALPNRVTERTVDKSTGKPTLYNVSLVMSDTAGTCY

SEQ ID NO: 15 - protein, 590 aa, Artificial Sequence
  Description of Artificial Sequence: Synthetic polypeptide
PKYVKQNTLKLATGGGGGSIEGRGSGGGSGDTRPRFLWQLKFECHFFNGTERVRLLERCIYNQEESVRFDSDVGEYRAVTELGRPDAEYWNSQKDLLEQRRAAVDTYCRHNYGVGESFTVQRRVEPKVTVYPSKTQPLQHHNLLVCSVSGFYPGSIEVRWFRNGQEEKAGVVSTGLIQNGDWTFQTLVMLETVPRSGEVYTCQVEHPSVTSPLTVEWRARSESAQSKGGGGSGGGGSGGGGSIAELPPKVSVFVPPRDGFFGNPRKSKLICQATGFSPRQIQVSWLREGKQVGSGVTTDQVQAEAKESGPTTYKVTSTLTIKESDWLGQSMFTCRVDHRGLTFQQNASSMCVPDQDTAIRVFAIPPSFASIFLTKSTKLTCLVTDLTTYDSVTISWTRQNGEAVKTHTNISESHPNATFSAVGEASICEDDWNSGERFTCTVTHTDLPSPLKQTISRPKGVALHRPDVYLLPPAREQLNLRESATITCLVTGFSPADVFVQWMQRGQPLSPEKYVTSAPMPEPQAPGRYFAHSILTVSEEEWNTGETYTCVVAHEALPNRVTERTVDKSTGKPTLYNVSLVMSDTAGTCY

SEQ ID NO: 16 - protein, 191 aa, Artificial Sequence
  Description of Artificial Sequence: Synthetic polypeptide
IKEEHVIIQAEFYLNPDQSGEFMFDFDGDEIFHVDMAKKETVWRLEEFGRFASFEAQGALANIAVDKANLEIMTKRSNYTPITNVPPEVTVLTNCPVELREPNVLICFIDKFTPPVVNVTWLRNGKPVTTGVSETVFLPREDHLFRKFHYLPFLPSTEDVYDCRVEHWGLDEPLLKHWEFDAPSPLPETTE

SEQ ID NO: 17 - protein, 589 aa, Artificial Sequence
  Description of Artificial Sequence: Synthetic polypeptide
PKYVKQNTLKLATGGGGSGGGGSGGGGSGDTRPRFLWQLKFECHFFNGTERVRLLERCIYNQEESVRFDSDVGEYRAVTELGRPDAEYWNSQKDLLEQRRAAVDTYCRHNYGVGESFTVQRRVEPKVTVYPSKTQPLQHHNLLVCSVCGFYPGSIEVRWFRNGQEEKAGVVSTGLIQNGDWTFQTLVMLETVPRSGEVYTCQVEHPSVTSPLTVEWRARSESAQSKGGGGSGGGGSGGGGSIAELPPKVSVFVPPRDGFFGNPRKSKLICQATGFSPRQIQVSWLREGKQVGSGVTTDQVQAEAKESGPTTYKVTSTLTIKESDWLGQSMFTCRVDHRGLTFQQNASSMCVPDQDTAIRVFAIPPSFASIFLTKSTKLTCLVTDLTTYDSVTISWTRQNGEAVKTHTNISESHPNATFSAVGEASICEDDWNSGERFTCTVTHTDLPSPLKQTISRPKGVALHRPDVYLLPPAREQLNLRESATITCLVTGFSPADVFVQWMQRGQPLSPEKYVTSAPMPEPQAPGRYFAHSILTVSEEEWNTGETYTCVVAHEALPNRVTERTVDKSTGKPTLYNVSLVMSDTAGTCY

SEQ ID NO: 18 - protein, 592 aa, Artificial Sequence
  Description of Artificial Sequence: Synthetic polypeptide
PVSKMRMATPLLMQAGGGGGSIEGRGSGGGSGDTRPRFLWQLKFECHFFNGTERVRLLERCIYNQEESVRFDSDVGEYRAVTELGRPDAEYWNSQKDLLEQRRAAVDTYCRHNYGVGESFTVQRRVEPKVTVYPSKTQPLQHHNLLVCSVSGFYPGSIEVRWFRNGQEEKAGVVSTGLIQNGDWTFQTLVMLETVPRSGEVYTCQVEHPSVTSPLTVEWRARSESAQSKGGGGSGGGGSGGGGSIAELPPKVSVFVPPRDGFFGNPRKSKLICQATGFSPRQIQVSWLREGKQVGSGVTTDQVQAEAKESGPTTYKVTSTLTIKESDWLGQSMFTCRVDHRGLTFQQNASSMCVPDQDTAIRVFAIPPSFASIFLTKSTKLTCLVTDLTTYDSVTISWTRQNGEAVKTHTNISESHPNATFSAVGEASICEDDWNSGERFTCTVTHTDLPSPLKQTISRPKGVALHRPDVYLLPPAREQLNLRESATITCLVTGFSPADVFVQWMQRGQPLSPEKYVTSAPMPEPQAPGRYFAHSILTVSEEEWNTGETYTCVVAHEALPNRVTERTVDKSTGKPTLYNVSLVMSDTAGTCY

SEQ ID NO: 19 - protein, 9 aa, Human betaherpesvirus 5
NLVPMVATV

SEQ ID NO: 20 - protein, 10 aa, Homo sapiens
ELAGIGILTV

SEQ ID NO: 21 - protein, 13 aa, Influenza A virus
PKYVKQNTLKLAT

SEQ ID NO: 22 - protein, 15 aa, Artificial Sequence
  Description of Artificial Sequence: Synthetic peptide
PVSKMRMATPLLMQA

SEQ ID NO: 23 - protein, 760 aa, Artificial Sequence
  Description of Artificial Sequence: Synthetic polypeptide
IQRTPKIQVYSRHPAENGKSNFLNCYVSGFHPSDIEVDLLKNGERIEKVEHSDLSFSKDWSFYLLYYTEFTPTEKDEYACRVNHVTLSQPKIVKWDRDMGGGGSGGGGSGGGGSGGGGSGSHSMRYFFTSVSRPGRGEPRFIAVGYVDDTQFVRFDSDAASQRMEPRAPWIEQEGPEYWDGETRKVKAHSQTHRVDLGTLRGCYNQSEAGSHTVQRMYGCDVGSDWRFLRGYHQYAYDGKDYIALKEDLRSWTAADMCAQTTKHKWEAAHVAEQLRAYLEGTCVEWLRRYLENGKETLQRTDAPKTHMTHHAVSDHEATLRCWALSFYPAEITLTWQRDGEDQTQDTELVETRPAGDGTFQKWAAVVVPSGQEQRYTCHVQHEGLPKPLTLRWEPSSGGGGSGGGGSGGGGSIAELPPKVSVFVPPRDGFFGNPRKSKLICQATGFSPRQIQVSWLREGKQVGSGVTTDQVQAEAKESGPTTYKVTSTLTIKESDWLGQSMFTCRVDHRGLTFQQNASSMCVPDQDTAIRVFAIPPSFASIFLTKSTKLTCLVTDLTTYDSVTISWTRQNGEAVKTHTNISESHPNATFSAVGEASICEDDWNSGERFTCTVTHTDLPSPLKQTISRPKGVALHRPDVYLLPPAREQLNLRESATITCLVTGFSPADVFVQWMQRGQPLSPEKYVTSAPMPEPQAPGRYFAHSILTVSEEEWNTGETYTCVVAHEALPNRVTERTVDKSTGKPTLYNVSLVMSDTAGTCY

SEQ ID NO: 24 - protein, 641 aa, Artificial Sequence
  Description of Artificial Sequence: Synthetic polypeptide
GSHSMRYFFTSVSRPGRGEPRFIAVGYVDDTQFVRFDSDAASQRMEPRAPWIEQEGPEYWDGETRKVKAHSQTHRVDLGTLRGCYNQSEAGSHTVQRMYGCDVGSDWRFLRGYHQYAYDGKDYIALKEDLRSWTAADMCAQTTKHKWEAAHVAEQLRAYLEGTCVEWLRRYLENGKETLQRTDAPKTHMTHHAVSDHEATLRCWALSFYPAEITLTWQRDGEDQTQDTELVETRPAGDGTFQKWAAVVVPSGQEQRYTCHVQHEGLPKPLTLRWEPSSGGGGSGGGGSGGGGSIAELPPKVSVFVPPRDGFFGNPRKSKLICQATGFSPRQIQVSWLREGKQVGSGVTTDQVQAEAKESGPTTYKVTSTLTIKESDWLGQSMFTCRVDHRGLTFQQNASSMCVPDQDTAIRVFAIPPSFASIFLTKSTKLTCLVTDLTTYDSVTISWTRQNGEAVKTHTNISESHPNATFSAVGEASICEDDWNSGERFTCTVTHTDLPSPLKQTISRPKGVALHRPDVYLLPPAREQLNLRESATITCLVTGFSPADVFVQWMQRGQPLSPEKYVTSAPMPEPQAPGRYFAHSILTVSEEEWNTGETYTCVVAHEALPNRVTERTVDKSTGKPTLYNVSLVMSDTAGTCY

SEQ ID NO: 25 - protein, 119 aa, Homo sapiens
MSRSVALAVLALLSLSGLEAIQRTPKIQVYSRHPAENGKSNFLNCYVSGFHPSDIEVDLLKNGERIEKVEHSDLSFSKDWSFYLLYYTEFTPTEKDEYACRVNHVTLSQPKIVKWDRDM

SEQ ID NO: 26 - protein, 137 aa, Homo sapiens
QEDERIVLVDNKCKCARITSRIIRSSEDPNEDIVERNIRIIVPLNNRENISDPTSPLRTRFVYHLSDLCKKCDPTEVELDNQIVTATQSNICDEDSATETCYTYDRNKCYTAVVPLVYGGETKMVETALTPDACYPD

SEQ ID NO: 27 - protein, 266 aa, Artificial Sequence
  Description of Artificial Sequence: Synthetic polypeptide
QEDERIVLVDNKCKCARITSRIIRSSEDPNEDIVERNIRIIVPLNNRENISDPTSPLRTRFVYHLSDLCKKCDPTEVELDNQIVTATQSNICDEDSATETCYTYDRNKCYTAVVPLVYGGETKMVETALTPDACYPDGGGGSGGGGSGGGGSFTVTVPKDLYVVEYGSNMTIECKFPVEKQLDLAALIVYWEMEDKNIIQFVHGEEDLKVQHSSYRQRARLLKDQLSLGNAALQITDVKLQDAGVYRCMISYGGADYKRITVKVNA

SEQ ID NO: 28 - protein, 372 aa, Artificial Sequence
  Description of Artificial Sequence: Synthetic polypeptide
QEDERIVLVDNKCKCARITSRIIRSSEDPNEDIVERNIRIIVPLNNRENISDPTSPLRTRFVYHLSDLCKKCDPTEVELDNQIVTATQSNICDEDSATETCYTYDRNKCYTAVVPLVYGGETKMVETALTPDACYPDGGGGSGGGGSGGGGSFTVTVPKDLYVVEYGSNMTIECKFPVEKQLDLAALIVYWEMEDKNIIQFVHGEEDLKVQHSSYRQRARLLKDQLSLGNAALQITDVKLQDAGVYRCMISYGGADYKRITVKVNAPYNKINQRILVVDPVTSEHELTCQAEGYPKAEVIWTSSDHQVLSGKTTTTNSKREEKLFNVTSTLRINTTTNEIFYCTFRRLDPEENHTAELVIPELPLAHPPNER

SEQ ID NO: 29 - protein, 365 aa, Homo sapiens [sequence omitted]

SEQ ID NO: 30 - protein, 278 aa, Homo sapiens [sequence omitted]

SEQ ID NO: 31 - protein, 278 aa, Homo sapiens
GSHSMRYFFTSVSRPGRGEPRFIAVGYVDDTQFVRFDSDAASQKMEPRAPWIEQEGPEYWDQETRNMKAHSQTDRANLGTLRGYYNQSEDGSHTIQIMYGCDVGPDGRFLRGYRQDAYDGKDYIALNEDLRSWTAADMAAQITKRKWEAVHAAEQRRVYLEGRCVDGLRRYLENGKETLQRTDPPKTHMTHHPISDHEATLRCWALGFYPAEITLTWQRDGEDQTQDTELVETRPAGDGTFQKWAAVVVPSGEEQRYTCHVQHEGLPKPLTLRWELSS

SEQ ID NO: 32 - protein, 278 aa, Homo sapiens
GSHSMRYFFTSVSRPGRGEPRFIAVGYVDDTQFVRFDSDAASQRMEPRAPWIEQEGPEYWDQETRNVKAQSQTDRVDLGTLRGYYNQSEAGSHTIQIMYGCDVGSDGRFLRGYRQDAYDGKDYIALNEDLRSWTAADMAAQITKRKWEAAHEAEQLRAYLDGTCVEWLRRYLENGKETLQRTDPPKTHMTHHPISDHEATLRCWALGFYPAEITLTWQRDGEDQTQDTELVETRPAGDGTFQKWAAVVVPSGEEQRYTCHVQHEGLPKPLTLRWELSS

SEQ ID NO: 33 - protein, 278 aa, Homo sapiens
GSHSMRYFYTSVSRPGRGEPRFIAVGYVDDTQFVRFDSDAASQRMEPRAPWIEQEGPEYWDQETRNVKAQSQTDRVDLGTLRGYYNQSEDGSHTIQIMYGCDVGPDGRFLRGYRQDAYDGKDYIALNEDLRSWTAADMAAQITKRKWEAAHAAEQQRAYLEGRCVEWLRRYLENGKETLQRTDPPKTHMTHHPISDHEATLRCWALGFYPAEITLTWQRDGEDQTQDTELVETRPAGDGTFQKWAAVVVPSGEEQRYTCHVQHEGLPKPLTLRWELSS

SEQ ID NO: 34 - protein, 278 aa, Homo sapiens
GSHSMRYFSTSVSRPGRGEPRFIAVGYVDDTQFVRFDSDAASQRMEPRAPWIEQEGPEYWDEETGKVKAHSQTDRENLRIALRYYNQSEAGSHTLQMMFGCDVGSDGRFLRGYHQYAYDGKDYIALKEDLRSWTAADMAAQITKRKWEAAHVAEQQRAYLEGTCVDGLRRYLENGKETLQRTDPPKTHMTHHPISDHEATLRCWALGFYPAEITLTWQRDGEDQTQDTELVETRPAGDGTFQKWAAVVVPSGEEQRYTCHVQHEGLPKPLTLRWEPSS

SEQ ID NO: 35 - protein, 278 aa, Homo sapiens
GSHSMRYFYTSVSRPGRGEPRFISVGYVDDTQFVRFDSDAASPREEPRAPWIEQEGPEYWDRNTQIYKAQAQTDRESLRNLRGYYNQSEAGSHTLQSMYGCDVGPDGRLLRGHDQYAYDGKDYIALNEDLRSWTAADTAAQITQRKWEAAREAEQRRAYLEGECVEWLRRYLENGKDKLERADPPKTHVTHHPISDHEATLRCWALGFYPAEITLTWQRDGEDQTQDTELVETRPAGDRTFQKWAAVVVPSGEEQRYTCHVQHEGLPKPLTLRWEPSS

SEQ ID NO: 36 - protein, 278 aa, Homo sapiens
GSHSMRYFSTSVSWPGRGEPRFIAVGYVDDTQFVRFDSDAASPRGEPREPWVEQEGPEYWDRETQKYKRQAQADRVNLRKLRGYYNQSEDGSHTLQRMFGCDLGPDGRLLRGYNQFAYDGKDYIALNEDLRSWTAADTAAQITQRKWEAAREAEQRRAYLEGTCVEWLRRYLENGKETLQRAEHPKTHVTHHPVSDHEATLRCWALGFYPAEITLTWQWDGEDQTQDTELVETRPAGDGTFQKWAAVVVPSGEEQRYTCHVQHEGLPEPLTLRWKPSS

SEQ ID NO: 37 - protein, 278 aa, Homo sapiens
CSHSMRYFDTAVSRPGRGEPRFISVGYVDDTQFVRFDSDAASPRGEPRAPWVEQEGPEYWDRETQKYKRQAQADRVSLRNLRGYYNQSEDGSHTLQRMSGCDLGPDGRLLRGYDQSAYDGKDYIALNEDLRSWTAADTAAQITQRKLEAARAAEQLRAYLEGTCVEWLRRYLENGKETLQRAEPPKTHVTHHPLSDHEATLRCWALGFYPAEITLTWQRDGEDQTQDTELVETRPAGDGTFQKWAAVVVPSGQEQRYTCHMQHEGLQEPLTLSWEPSS

SEQ ID NO: 38 - protein, 278 aa, Homo sapiens
GSHSMRYFDTAMSRPGRGEPRFISVGYVDDTQFVRFDSDAASPREEPRAPWIEQEGPEYWDRNTQIFKTNTQTDRESLRNLRGYYNQSEAGSHTLQSMYGCDVGPDGRLLRGHNQYAYDGKDYIALNEDLRSWTAADTAAQITQRKWEAARVAEQDRAYLEGTCVEWLRRYLENGKDTLERADPPKTHVTHHPISDHEATLRCWALGFYPAEITLTWQRDGEDQTQDTELVETRPAGDRTFQKWAAVVVPSGEEQRYTCHVQHEGLPKPLTLRWEPSS

SEQ ID NO: 39 - protein, 278 aa, Homo sapiens
GSHSMRYFYTAMSRPGRGEPRFIAVGYVDDTQFVRFDSDAASPRTEPRAPWIEQEGPEYWDRNTQIFKTNTQTYRESLRNLRGYYNQSEAGSHIIQRMYGCDLGPDGRLLRGHDQSAYDGKDYIALNEDLSSWTAADTAAQITQRKWEAARVAEQLRAYLEGLCVEWLRRYLENGKETLQRADPPKTHVTHHPVSDHEATLRCWALGFYPAEITLTWQRDGEDQTQDTELVETRPAGDRTFQKWAAVVVPSGEEQRYTCHVQHEGLPKPLTLRWEPSS

SEQ ID NO: 40 - protein, 278 aa, Homo sapiens
GSHSMRYFYTAMSRPGRGEPRFIAVGYVDDTQFVRFDSDAASPRMAPRAPWIEQEGPEYWDGETRNMKASAQTYRENLRIALRYYNQSEAGSHIIQVMYGCDVGPDGRLLRGHDQSAYDGKDYIALNEDLSSWTAADTAAQITQRKWEAARVAEQLRAYLEGLCVEWLRRYLENGKETLQRADPPKTHVTHHPISDHEATLRCWALGFYPAEITLTWQRDGEDQTQDTELVETRPAGDRTFQKWAAVVVPSGEEQRYTCHVQHEGLPKPLTLRWEPSS

SEQ ID NO: 41 - protein, 278 aa, Homo sapiens
GSHSMRYFYTAMSRPGRGEPRFIAVGYVDDTQFVRFDSDAASPRMAPRAPWIEQEGPEYWDGETRNMKASAQTYRENLRIALRYYNQSEAGSHIIQVMYGCDVGPDGRLLRGHNQYAYDGKDYIALNEDLSSWTAADTAAQITQRKWEAARVAEQLRAYLEGLCVEWLRRYLENGKETLQRADPPKTHVTHHPISDHEATLRCWALGFYPAEITLTWQRDGEDQTQDTELVETRPAGDRTFQKWAAVVVPSGEEQRYTCHVQHEGLPKPLTLRWEPSS

SEQ ID NO: 42 - protein, 278 aa, Homo sapiens
GSHSLKYFHTSVSRPGRGEPRFISVGYVDDTQFVRFDNDAASPRMVPRAPWMEQEGSEYWDRETRSARDTAQIFRVNLRTLRGYYNQSEAGSHTLQWMHGCELGPDGRFLRGYEQFAYDGKDYLTLNEDLRSWTAVDTAAQISEQKSNDASEAEHQRAYLEDTCVEWLHKYLEKGKETLLHLEPPKTHVTHHPISDHEATLRCWALGFYPAEITLTWQQDGEGHTQDTELVETRPAGDGTFQKWAAVVVPSGEEQRYTCHVQHEGLPEPVTLRWKPAS

SEQ ID NO: 43 - protein, 278 aa, Homo sapiens
CSHSMRYFYTAVSRPGRGEPRFIAVGYVDDTQFVRFDSDAASPRGEPRAPWVEQEGPEYWDRETQKYKRQAQTDRVSLRNLRGYYNQSEAGSHTLQWMYGCDLGPDGRLLRGYDQSAYDGKDYIALNEDLRSWTAADTAAQITQRKWEAARAAEQQRAYLEGTCVEWLRRYLENGKETLQRAEHPKTHVTHHLVSDHEATLRCWALGFYPAEITLTWQRDGEDQTQDTELVETRPAGDGTFQKWAAVVVPSGEEQRYTCHVQHEGLPEPLTLRWEPSS

SEQ ID NO: 44 - protein, 278 aa, Homo sapiens
CSHSMRYFYTAVSRPGRGEPRFIAVGYVDDTQFVQFDSDAASPRGEPRAPWVEQEGPEYWDRETQKYKRQAQTDRVSLRNLRGYYNQSEAGSHTLQRMYGCDLGPDGRLLRGYNQFAYDGKDYIALNEDLRSWTAADKAAQITQRKWEAAREAEQRRAYLEGTCVEWLRRYLENGKKTLQRAEHPKTHVTHHPVSDHEATLRCWALGFYPAEITLTWQRDGEDQTQDTELVETRPAGDGTFQKWAAVVVPSGEEQRYTCHVQHEGLPEPLTLRWGPSS

SEQ ID NO: 45 - protein, 278 aa, Homo sapiens
CSHSMRYFDTAVSRPGRGEPRFISVGYVDDTQFVRFDSDAASPRGEPRAPWVEQEGPEYWDRETQNYKRQAQADRVSLRNLRGYYNQSEDGSHTLQRMYGCDLGPDGRLLRGYDQSAYDGKDYIALNEDLRSWTAADTAAQITQRKLEAARAAEQLRAYLEGTCVEWLRRYLENGKETLQRAEPPKTHVTHHPLSDHEATLRCWALGFYPAEITLTWQRDGEDQTQDTELVETRPAGDGTFQKWAAVVVPSGQEQRYTCHMQHEGLQEPLTLSWEPSS

SEQ ID NO: 46 - protein, 278 aa, Homo sapiens
CSHSMRYFYTAVSRPGRGEPRFIAVGYVDDTQFVQFDSDAASPRGEPRAPWVEQEGPEYWDRETQKYKRQAQTDRVNLRKLRGYYNQSEAGSHTLQRMYGCDLGPDGRLLRGYNQFAYDGKDYIALNEDLRSWTAADKAAQITQRKWEAAREAEQRRAYLEGTCVEWLRRYLENGKKTLQRAEHPKTHVTHHPVSDHEATLRCWALGFYPAEITLTWQRDGEDQTQDTELVETRPAGDGTFQKWAAVVVPSGEEQRYTCHVQHEGLPEPLTLRWGPSS

SEQ ID NO: 47 - protein, 278 aa, Homo sapiens
GSHSMRYFYTAMSRPGRGEPRFITVGYVDDTLFVRFDSDATSPRKEPRAPWIEQEGPEYWDRETQISKTNTQTYRENLRTALRYYNQSEAGSHIIQRMYGCDVGPDGRLLRGYDQDAYDGKDYIALNEDLSSWTAADTAAQITQRKWEAARVAEQDRAYLEGLCVESLRRYLENGKETLQRADPPKTHVTHHPISDHEVTLRCWALGFYPAEITLTWQRDGEDQTQDTELVETRPAGDRTFQKWAAVVVPSGEEQRYTCHVQHEGLPKPLTLRWEPSS

SEQ ID NO: 48 - protein, 278 aa, Homo sapiens
GSHSMRYFTTSVSRPGRGEPRFIAVGYVDDTQFVRFDSDAASQRMEPRAPWIEQEGPEYWDLQTRNVKAQSQTDRANLGTLRGYYNQSEAGSHTIQMMYGCDVGSDGRFLRGYRQDAYDGKDYIALNEDLRSWTAADMAAQITQRKWEAARVAEQLRAYLEGTCVEWLRRYLENGKETLQRTDAPKTHMTHHAVSDHEATLRCWALSFYPAEITLTWQRDGEDQTQDTELVETRPAGDGTFQKWASVVVPSGQEQRYTCHVQHEGLPKPLTLRWEPSS

SEQ ID NO: 49 - protein, 278 aa, Homo sapiens
GSHSMRYFYTAMSRPGRGEPRFITVGYVDDTLFVRFDSDATSPRKEPRAPWIEQEGPEYWDRETQISKTNTQTYRENLRTALRYYNQSEAGSHIIQRMYGCDVGPDGRLLRGYDQDAYDGKDYIALNEDLSSWTAADTAAQITQRKWEAARVAEQLRAYLEGLCVESLRRYLENGKETLQRADPPKTHVTHHPISDHEVTLRCWALGFYPAEITLTWQRDGEDQTQDTELVETRPAGDRTFQKWAAVVVPSGEEQRYTCHVQHEGLPKPLTLRWEPSS

SEQ ID NO: 50 - protein, 278 aa, Homo sapiens
GSHSMRYFYTAVSRPGRGEPHFIAVGYVDDTQFVRFDSDAASPRGEPRAPWVEQEGPEYWDRETQKYKRQAQTDRVSLRNLRGYYNQSEAGSHIIQRMYGCDVGPDGRLLRGYDQYAYDGKDYIALNEDLRSWTAADTAAQITQRKWEAAREAEQLRAYLEGLCVEWLRRYLKNGKETLQRAEHPKTHVTHHPVSDHEATLRCWALGFYPAEITLTWQWDGEDQTQDTELVETRPAGDGTFQKWAAVVVPSGEEQRYTCHVQHEGLPEPLTLRWEPSS

SEQ ID NO: 51 - protein, 278 aa, Homo sapiens
GSHSMRYFHTAMSRPGRGEPRFITVGYVDDTLFVRFDSDATSPRKEPRAPWIEQEGPEYWDRETQISKTNTQTYRESLRNLRGYYNQSEAGSHTLQRMYGCDVGPDGRLLRGHNQYAYDGKDYIALNEDLRSWTAADTAAQISQRKLEAARVAEQLRAYLEGECVEWLRRYLENGKDKLERADPPKTHVTHHPISDHEATLRCWALGFYPAEITLTWQRDGEDQTQDTELVETRPAGDRTFQKWAAVVVPSGEEQRYTCHVQHEGLPKPLTLRWEPSS

SEQ ID NO: 52 - protein, 278 aa, Homo sapiens
CSHSMRYFDTAVSRPGRGEPRFISVGYVDDTQFVRFDSDAASPRGEPRAPWVEQEGPEYWDRETQKYKRQAQADRVNLRKLRGYYNQSEDGSHTLQWMYGCDLGPDGRLLRGYDQSAYDGKDYIALNEDLRSWTAADTAAQITQRKWEAAREAEQWRAYLEGTCVEWLRRYLENGKETLQRAEHPKTHVTHHPVSDHEATLRCWALGFYPAEITLTWQRDGEDQTQDTELVETRPAGDGTFQKWAAVVVPSGEEQRYTCHVQHEGLPEPLTLRWEPSS

SEQ ID NO: 53 - protein, 278 aa, Homo sapiens
GSHSMRYFYTAMSRPGRGEPRFIAVGYVDDTQFVRFDSDAASPRMAPRAPWIEQEGPEYWDRETQISKTNTQTYRESLRNLRGYYNQSEAGSHTLQRMYGCDVGPDGRLLRGHDQSAYDGKDYIALNEDLSSWTAADTAAQITQRKWEAAREAEQWRAYLEGLCVEWLRRYLENGKETLQRADPPKTHVTHHPISDHEATLRCWALGFYPAEITLTWQRDGEDQTQDTELVETRPAGDRTFQKWAAVVVPSGEEQRYTCHVQHEGLPKPLTLRWEPSS

SEQ ID NO: 54 - protein, 278 aa, Homo sapiens
GSHSMRYFYTAVSRPGRGEPHFIAVGYVDDTQFVRFDSDAASPRGEPRAPWVEQEGPEYWDRETQKYKRQAQTDRVSLRNLRGYYNQSEARSHIIQRMYGCDVGPDGRLLRGYDQYAYDGKDYIALNEDLRSWTAADTAAQITQRKWEAAREAEQLRAYLEGLCVEWLRRYLKNGKETLQRAEHPKTHVTHHPVSDHEATLRCWALGFYPAEITLTWQWDGEDQTQDTELVETRPAGDGTFQKWAAVVVPSGEEQRYTCHVQHEGLPEPLTLRWEPSS

SEQ ID NO: 55 - protein, 278 aa, Homo sapiens
GSHSMRYFSTSVSRPGSGEPRFIAVGYVDDTQFVRFDSDAASQRMEPRAPWIEQERPEYWDQETRNVKAQSQTDRVDLGTLRGYYNQSEAGSHTIQIMYGCDVGSDGRFLRGYEQHAYDGKDYIALNEDLRSWTAADMAAQITQRKWEAARWAEQLRAYLEGTCVEWLRRYLENGKETLQRTDPPKTHMTHHPISDHEATLRCWALGFYPAEITLTWQRDGEDQTQDTELVETRPAGDGTFQKWAAVVVPSGEEQRYTCHVQHEGLPKPLTLRWELSS

SEQ ID NO: 56 - protein, 278 aa, Homo sapiens
GSHSMRYFYTAMSRPGRGEPRFITVGYVDDTQFVRFDSDATSPRMAPRAPWIEQEGPEYWDRETQISKTNTQTYRENLRTALRYYNQSEAGSHTWQTMYGCDLGPDGRLLRGHNQLAYDGKDYIALNEDLSSWTAADTAAQITQLKWEAARVAEQLRAYLEGECVEWLRRYLENGKETLQRADPPKTHVTHHPISDHEATLRCWALGFYPAEITLTWQRDGEDQTQDTELVETRPAGDRTFQKWAAVVVPSGEEQRYTCHVQHEGLPKPLTLRWEPSS

SEQ ID NO: 57 - protein, 278 aa, Homo sapiens
CSHSMRYFYTAVSRPGRGEPRFIAVGYVDDTQFVRFDSDAASPRGEPRAPWVEQEGPEYWDRETQKYKRQAQADRVSLRNLRGYYNQSEAGSHTLQWMYGCDLGPDGRLLRGYDQSAYDGKDYIALNEDLRSWTAADTAAQITQRKWEAAREAEQWRAYLEGTCVEWLRRYLENGKETLQRAEHPKTHVTHHPVSDHEATLRCWALGFYPAEITLTWQRDGEDQTQDTELVETRPAGDGTFQKWAAVVVPSGEEQRYTCHVQHEGLPEPLTLRWEPSS

SEQ ID NO: 58 - protein, 278 aa, Homo sapiens
GSHSMRYFYTSVSRPGRGEPRFIAVGYVDDTQFVRFDSDAASQRMEPRAPWIEQEGPEYWDRNTRNVKAHSQTDRANLGTLRGYYNQSEDGSHTIQRMYGCDVGPDGRFLRGYQQDAYDGKDYIALNEDLRSWTAADMAAQITQRKWETAHEAEQWRAYLEGRCVEWLRRYLENGKETLQRTDAPKTHMTHHAVSDHEATLRCWALSFYPAEITLTWQRDGEDQTQDTELVETRPAGDGTFQKWASVVVPSGQEQRYTCHVQHEGLPKPLTLRWEPSS

SEQ ID NO: 59 - protein, 278 aa, Homo sapiens
GSHSMRYFYTSVSRPGRGEPRFISVGYVDDTQFVRFDSDAASPREEPRAPWIEQEGPEYWDRNTQICKTNTQTYRENLRIALRYYNQSEAGSHTLQRMYGCDVGPDGRLLRGHNQFAYDGKDYIALNEDLSSWTAADTAAQITQRKWEAARVAEQLRTYLEGTCVEWLRRYLENGKETLQRADPPKTHVTHHPISDHEATLRCWALGFYPAEITLTWQRDGEDQTQDTELVETRPAGDRTFQKWAAVVVPSGEEQRYTCHVQHEGLPKPLTLRWEPSS

SEQ ID NO: 60 - protein, 278 aa, Homo sapiens
GSHSMRYFYTAVSRPGRGEPRFISVGYVDDTQFVRFDSDAASPREEPRAPWIEQEGPEYWDRNTQICKTNTQTDRESLRNLRGYYNQSEAGSHTLQWMYGCDVGPDGRLLRGYNQFAYDGKDYIALNEDLSSWTAADTAAQITQRKWEAAREAEQLRAYLEGTCVEWLRRHLENGKETLQRADPPKTHVTHHPISDHEATLRCWALGFYPAEITLTWQRDGEDQTQDTELVETRPAGDRTFQKWAAVVVPSGEEQRYTCHVQHEGLPKPLTLRWEPSS

SEQ ID NO: 61 - protein, 278 aa, Homo sapiens
GSHSMRYFTTSVSRPGRGEPRFIAVGYVDDTQFVRFDSDAASQRMEPRAPWIEQEGPEYWDRNTRNVKAHSQIDRVDLGTLRGYYNQSEAGSHTIQMMYGCDVGSDGRFLRGYQQDAYDGKDYIALNEDLRSWTAADMAAQITQRKWEAARVAEQLRAYLEGTCVEWLRRHLENGKETLQRTDPPRTHMTHHAVSDHEATLRCWALSFYPAEITLTWQRDGEDQTQDTELVETRPAGDGTFQKWASVVVPSGQEQRYTCHVQHEGLPKPLTLRWEPSS

SEQ ID NO: 62 - protein, 278 aa, Homo sapiens
GSHSMRYFSTSVSRPGRGEPRFIAVGYVDDTQFVRFDSDAASQRMEPRAPWIEQEGPEYWDEETGKVKAHSQTDRENLRIALRYYNQSEAGSHTLQMMFGCDVGSDGRFLRGYHQYAYDGKDYIALKEDLRSWTAADMAAQITQRKWEAARVAEQLRAYLEGTCVDGLRRYLENGKETLQRTDPPKTHMTHHPISDHEATLRCWALGFYPAEITLTWQRDGEDQTQDTELVETRPAGDGTFQKWAAVVVPSGEEQRYTCHVQHEGLPKPLTLRWEPSS

SEQ ID NO: 63 - protein, 278 aa, Homo sapiens
GSHSMRYFYTSVSRPGRGEPRFIAVGYVDDTQFVRFDSDAASQRMEPRAPWIEQEGPEYWDRNTRNVKAHSQTDRESLRIALRYYNQSEDGSHTIQRMYGCDVGPDGRFLRGYQQDAYDGKDYIALNEDLRSWTAADMAAQITQRKWETAHEAEQWRAYLEGRCVEWLRRYLENGKETLQRTDAPKTHMTHHAVSDHEATLRCWALSFYPAEITLTWQRDGEDQTQDTELVETRPAGDGTFQKWASVVVPSGQEQRYTCHVQHEGLPKPLTLRWEPSS

SEQ ID NO: 64 - protein, 278 aa, Homo sapiens
GSHSMRYFHTSVSRPGRGEPRFISVGYVDGTQFVRFDSDAASPRTEPRAPWIEQEGPEYWDRNTQISKTNTQTYRESLRNLRGYYNQSEAGSHTLQRMYGCDVGPDGRLLRGHDQSAYDGKDYIALNEDLSSWTAADTAAQITQRKWEAARVAEQLRAYLEGTCVEWLRRHLENGKETLQRADPPKTHVTHHPISDHEATLRCWALGFYPAEITLTWQRDGEDQTQDTELVETRPAGDRTFQKWAAVVVPSGEEQRYTCHVQHEGLPKPLTLRWEPSS

SEQ ID NO: 65 - protein, 278 aa, Homo sapiens
GSHSMRYFHTSVSRPGRGEPRFISVGYVDDTQFVRFDSDAASPRTEPRAPWIEQEGPEYWDRETQISKTNTQTYREDLRTLLRYYNQSEAGSHTIQRMSGCDVGPDGRLLRGYNQFAYDGKDYIALNEDLSSWTAADTAAQITQRKWEAARVAEQDRAYLEGTCVEWLRRYLENGKETLQRADPPKTHVTHHPISDHEATLRCWALGFYPAEITLTWQRDGEDQTQDTELVETRPAGDRTFQKWAAVVVPSGEEQRYTCHVQHEGLPKPLTLRWEPSS

SEQ ID NO: 66 - protein, 278 aa, Homo sapiens
GSHSMRYFYTAMSRPGRGEPRFIAVGYVDDTQFVRFDSDAASPRTEPRAPWIEQEGPEYWDRNTQIFKTNTQTYRENLRIALRYYNQSEAGSHTWQTMYGCDVGPDGRLLRGHNQYAYDGKDYIALNEDLSSWTAADTAAQITQRKWEAAREAEQLRAYLEGLCVEWLRRHLENGKETLQRADPPKTHVTHHPVSDHEATLRCWALGFYPAEITLTWQRDGEDQTQDTELVETRPAGDRTFQKWAAVVVPSGEEQRYTCHVQHEGLPKPLTLRWEPSS

SEQ ID NO: 67 - protein, 278 aa, Homo sapiens
CSHSMRYFSTSVSRPGRGEPRFIAVGYVDDTQFVRFDSDAASPRGEPRAPWVEQEGPEYWDRETQKYKRQAQTDRVSLRNLRGYYNQSEAGSHTLQWMFGCDLGPDGRLLRGYDQSAYDGKDYIALNEDLRSWTAADTAAQITQRKWEAAREAEQRRAYLEGTCVEWLRRYLENGKETLQRAEHPKTHVTHHPVSDHEATLRCWALGFYPAEITLTWQWDGEDQTQDTELVETRPAGDGTFQKWAAVVVPSGEEQRYTCHVQHEGLPEPLTLRWEPSS

SEQ ID NO: 68 - protein, 278 aa, Homo sapiens
CSHSMRYFYTAVSRPGRGEPHFIAVGYVDDTQFVRFDSDAASPRGEPRAPWVEQEGPEYWDRETQNYKRQAQTDRVNLRKLRGYYNQSEAGSHIIQRMYGCDLGPDGRLLRGHDQLAYDGKDYIALNEDLRSWTAADTAAQITQRKWEAAREAEQLRAYLEGTCVEWLRRYLENGKETLQRAEHPKTHVTHHPVSDHEATLRCWALGFYPAEITLTWQRDGEDQTQDTELVETRPAGDGTFQKWAAVVVPSGEEQRYTCHVQHEGLPEPLTLRWEPSS

SEQ ID NO: 69 - protein, 278 aa, Homo sapiens
CSHSMRYFYTAVSRPSRGEPHFIAVGYVDDTQFVRFDSDAASPRGEPRAPWVEQEGPEYWDRETQKYKRQAQTDRVNLRKLRGYYNQSEAGSHTLQRMYGCDLGPDGRLLRGYDQSAYDGKDYIALNEDLRSWTAADTAAQITQRKWEAAREAEQWRAYLEGECVEWLRRYLENGKETLQRAEHPKTHVTHHPVSDHEATLRCWALGFYPTEITLTWQRDGEDQTQDTELVETRPAGDGTFQKWAAVVVPSGEEQRYTCHVQHEGLPEPLTLRWEPSS

SEQ ID NO: 70 - protein, 278 aa, Homo sapiens
GSHSMRYFHTSVSRPGRGEPRFITVGYVDDTLFVRFDSDAASPREEPRAPWIEQEGPEYWDRETQICKAKAQTDREDLRTLLRYYNQSEAGSHTLQNMYGCDVGPDGRLLRGYHQDAYDGKDYIALNEDLSSWTAADTAAQITQRKWEAARVAEQLRAYLEGECVEWLRRYLENGKETLQRADPPKTHVTHHPISDHEATLRCWALGFYPAEITLTWQRDGEDQTQDTELVETRPAGDRTFQKWAAVVVPSGEEQRYTCHVQHEGLPKPLTLRWEPSS

SEQ ID NO: 71 - protein, 278 aa, Homo sapiens
GSHSMRYFTTSVSRPGRGEPRFIAVGYVDDTQFVRFDSDAASQRMEPRAPWIEQERPEYWDQETRNVKAHSQIDRVDLGTLRGYYNQSEAGSHTIQMMYGCDVGSDGRFLRGYQQDAYDGKDYIALNEDLRSWTAADMAAQITQRKWEAARVAEQLRAYLEGTCVEWLRRYLENGKETLQRTDPPKTHMTHHAVSDHEATLRCWALSFYPAEITLTWQRDGEDQTQDTELVETRPAGDGTFQKWASVVVPSGQEQRYTCHVQHEGLPKPLTLRWEPSS

SEQ ID NO: 72 - protein, 278 aa, Homo sapiens
GSHSMRYFSTSVSRPGSGEPRFIAVGYVDDTQFVRFDSDAASQRMEPRAPWIEQERPEYWDQETRNVKAHSQTDRENLGTLRGYYNQSEAGSHTIQIMYGCDVGSDGRFLRGYEQHAYDGKDYIALNEDLRSWTAADMAAQITQRKWEAARRAEQLRAYLEGTCVEWLRRYLENGKETLQRTDPPKTHMTHHPISDHEATLRCWALGFYPAEITLTWQRDGEDQTQDTELVETRPAGDGTFQKWAAVVVPSGEEQRYTCHVQHEGLPKPLTLRWELSS

SEQ ID NO: 73 - protein, 278 aa, Homo sapiens
GSHSMRYFYTSVSRPGRGEPRFISVGYVDDTQFVRFDSDAASPREEPRAPWIEQEGPEYWDRNTQIYKAQAQTDRESLRNLRGYYNQSEAGSHTLQSMYGCDVGPDGRLLRGHNQYAYDGKDYIALNEDLRSWTAADTAAQITQRKWEAARVAEQDRAYLEGTCVEWLRRYLENGKDTLERADPPKTHVTHHPISDHEATLRCWALGFYPAEITLTWQRDGEDQTQDTELVETRPAGDRTFQKWAAVVVPSGEEQRYTCHVQHEGLPKPLTLRWEPSS

SEQ ID NO: 74 - protein, 278 aa, Homo sapiens
GSHSMRYFYTAVSRPGRGEPRFIAVGYVDDTQFVRFDSDAASPRGEPRAPWVEQEGPEYWDRETQKYKRQAQADRVNLRKLRGYYNQSEAGSHTIQRMYGCDLGPDGRLLRGYNQFAYDGKDYIALNEDLRSWTAADTAAQISQRKLEAAREAEQLRAYLEGECVEWLRGYLENGKETLQRAERPKTHVTHHPVSDHEATLRCWALGFYPAEITLTWQRDGEDQTQDTELVETRPAGDGTFQKWAAVVVPSGQEQRYTCHVQHEGLQEPCTLRWKPSS

SEQ ID NO: 75 - protein, 278 aa, Homo sapiens
GSHSMRYFYTAMSRPGRGEPRFIAVGYVDDTQFVRFDSDAASPRTEPRAPWIEQEGPEYWDRNTQIFKTNTQTYRESLRNLRGYYNQSEAGSHIIQRMYGCDLGPDGRFLRGHNQYAYDGKDYIALNEDLSSWTAADTAAQITQRKWEAARVAEQLRAYLEGLCVEWLRRYLENGKETLQRADPPKTHVTHHPVSDHEATLRCWALGFYPAEITLTWQRDGEDQTQDTELVETRPAGDRTFQKWAAVVVPSGEEQRYTCHVQHEGLPKPLTLRWEPSS

SEQ ID NO: 76 - protein, 278 aa, Homo sapiens
GSHSMRYFYTSVSRPGRGEPRFISVGYVDDTQFVRFDSDAASPREEPRAPWIEQEGPEYWDRNTQICKTNTQTDRESLRNLRGYYNQSEAGSHTWQTMYGCDVGPDGRLLRGHNQFAYDGKDYIALNEDLSSWTAADTAAQITQRKWEAARVAEQLRTYLEGTCVEWLRRYLENGKETLQRADPPKTHVTHHPISDHEATLRCWALGFYPAEITLTWQRDGEDQTQDTELVETRPAGDRTFQKWAAVVVPSGEEQRYTCHVQHEGLPKPLTLRWEPSS

SEQ ID NO: 77 - protein, 278 aa, Homo sapiens
GSHSMRYFYTAVSRPGRGEPHFIAVGYVDDTQFVRFDSDAASPRGEPRAPWVEQEGPEYWDRETQKYKRQAQTDRVSLRNLRGYYNQSEAGSHILQRMYGCDVGPDGRLLRGYDQSAYDGKDYIALNEDLRSWTAADTAAQITQRKWEAAREAEQLRAYLEGLCVEWLRRYLKNGKETLQRAEHPKTHVTHHPVSDHEATLRCWALGFYPAEITLTWQWDGEDQTQDTELVETRPAGDGTFQKWAAVVVPSGEEQRYTCHVQHEGLPEPLTLRWEPSS

SEQ ID NO: 78 - protein, 278 aa, Homo sapiens
GSHSMRYFYTAMSRPGRGEPRFIAVGYVDDTQFVRFDSDAASPRTEPRAPWIEQEGPEYWDGETRNMKASAQTYRENLRIALRYYNQSEAGSHIIQRMYGCDLGPDGRLLRGHDQSAYDGKDYIALNEDLSSWTAADTAAQITQRKWEAARVAEQLRAYLEGLCVEWLRRYLENGKETLQRADPPKTHVTHHPVSDHEATLRCWALGFYPAEITLTWQRDGEDQTQDTELVETRPAGDRTFQKWAAVVVPSGEEQRYTCHVQHEGLPKPLTLRWEPSS

SEQ ID NO: 79 - protein, 278 aa, Homo sapiens
GSHSMRYFTTSVSRPGRGEPRFIAVGYVDDTQFVRFDSDAASQRMEPRAPWIEQEGPEYWDRNTRNVKAHSQIDRVDLGTLRGYYNQSEAGSHTIQMMYGCDVGSDGRFLRGYQQDAYDGKDYIALNEDLRSWTAADMAAQITQRKWEAARVAEQLRAYLEGTCVEWLRRYLENGKETLQRTDPPKTHMTHHAVSDHEATLRCWALSFYPAEITLTWQRDGEDQTQDTELVETRPAGDGTFQKWASVVVPSGQEQRYTCHVQHEGLPKPLTLRWEPSS

SEQ ID NO: 80 - protein, 278 aa, Homo sapiens
GSHSMRYFYTSMSRPGRGEPRFIAVGYVDDTQFVRFDSDAASQRMEPRAPWIEQEGPEYWDRNTRNVKAQSQTDRVDLGTLRGYYNQSEAGSHTIQRMYGCDVGPDGRFLRGYHQYAYDGKDYIALKEDLRSWTAADMAAQTTKHKWEAAHVAEQWRAYLEGTCVEWLRRYLENGKETLQRTDAPKTHMTHHAVSDHEATLRCWALSFYPAEITLTWQRDGEDQTQDTELVETRPAGDGTFQKWVAVVVPSGQEQRYTCHVQHEGLPKPLTLRWEPSS

SEQ ID NO: 81 - protein, 278 aa, Homo sapiens
CSHSMKYFFTSVSRPGRGEPRFISVGYVDDTQFVRFDSDAASPRGEPRAPWVEQEGPEYWDRETQKYKRQAQTDRVSLRNLRGYYNQSEAGSHTLQWMCGCDLGPDGRLLRGYDQYAYDGKDYIALNEDLRSWTAADTAAQITQRKWEAAREAEQRRAYLEGTCVEWLRRYLENGKETLQRAEHPKTHVTHHPVSDHEATLRCWALGFYPAEITLTWQWDGEDQTQDTELVETRPAGDGTFQKWAAVMVPSGEEQRYTCHVQHEGLPEPLTLRWEPSS

SEQ ID NO: 82 - protein, 278 aa, Homo sapiens
CSHSMRYFDTAVSRPGRGEPRFISVGYVDDTQFVRFDSDAASPRGEPRAPWVEQEGPEYWDRETQKYKRQAQADRVSLRNLRGYYNQSEDGSHTFQRMYGCDLGPDGRLLRGYDQFAYDGKDYIALNEDLRSWTAADTAAQITQRKLEAARAAEQDRAYLEGTCVEWLRRYLENGKKTLQRAEPPKTHVTHHPLSDHEATLRCWALGFYPAEITLTWQRDGEDQTQDTELVETRPAGDGTFQKWAAVVVPSGQEQRYTCHMQHEGLQEPLTLSWEPSS

SEQ ID NO: 83 - protein, 278 aa, Homo sapiens
GSHSMRYFYTSVSRPGRGEPRFIAVGYVDDTQFVRFDSDAASQRMEPRAPWIEQEGPEYWDRNTRNVKAQSQTDRVDLGTLRGYYNQSEAGSHTIQMMYGCDVGSDGRFLRGYRQDAYDGKDYIALKEDLRSWTAADMAAQTTKHKWEAAHVAEQWRAYLEGTCVEWLRRYLENGKETLQRTDAPKTHMTHHAVSDHEATLRCWALSFYPAEITLTWQRDGEDQTQDTELVETRPAGDGTFQKWVAVVVPSGQEQRYTCHVQHEGLPKPLTLRWEPSS

SEQ ID NO: 84 - protein, 278 aa, Homo sapiens
GSHSMRYFFTSVSRPGRGEPRFIAVGYVDDTQFVRFDSDAASQRMEPRAPWIEQEGPEYWDQETRNVKAHSQTDRESLRIALRYYNQSEAGSHTIQMMYGCDVGPDGRLLRGYQQDAYDGKDYIALNEDLRSWTAADMAAQITQRKWEAARVAEQLRAYLEGTCVEWLRRYLENGKETLQRTDAPKTHMTHHAVSDHEATLRCWALSFYPAEITLTWQRDGEDQTQDTELVETRPAGDGTFQKWASVVVPSGQEQRYTCHVQHEGLPKPLTLRWEPSS

SEQ ID NO: 85 - protein, 278 aa, Homo sapiens
GSHSMRYFHTAMSRPGRGEPRFITVGYVDDTLFVRFDSDATSPRKEPRAPWIEQEGPEYWDRETQISKTNTQTYRENLRIALRYYNQSEAGSHTWQRMYGCDLGPDGRLLRGYNQLAYDGKDYIALNEDLSSWTAADTAAQITQRKWEAAREAEQLRAYLEGLCVEWLRRYLENGKETLQRADPPKTHVTHHPISDHEATLRCWALGFYPAEITLTWQRDGEDQTQDTELVETRPAGDRTFQKWAAVVVPSGEEQRYTCHVQHEGLPKPLTLRWEPSS

SEQ ID NO: 86 - protein, 278 aa, Homo sapiens
GSHSMRYFYTAMSRPGRGEPRFIAVGYVDDTQFVRFDSDAASPRTEPRAPWIEQEGPEYWDRNTQIFKTNTQTYRENLRIALRYYNQSEAGSHIIQRMYGCDLGPDGRLLRGHDQSAYDGKDYIALNEDLSSWTAADTAAQITQRKWEAARVAEQLRAYLEGLCVEWLRRYLENGKETLQRADPPKTHVTHHPVSDHEATLRCWALGFYPAEITLTWQRDGEDQTQDTELVETRPAGDRTFQKWAAVVVPSGEEQRYTCHVQHEGLPKPLTLRWEPSS

SEQ ID NO: 87 - protein, 278 aa, Homo sapiens
GSHSMRYFHTAMSRPGRGEPRFITVGYVDDTLFVRFDSDATSPRKEPRAPWIEQEGPEYWDRETQISKTNTQTYRESLRNLRGYYNQSEAGSHTWQRMYGCDLGPDGRLLRGYNQLAYDGKDYIALNEDLSSWTAADTAAQITQRKWEAAREAEQLRAYLEGLCVEWLRRYLENGKETLQRADPPKTHVTHHPISDHEATLRCWALGFYPAEITLTWQRDGEDQTQDTELVETRPAGDRTFQKWAAVVVPSGEEQRYTCHVQHEGLPKPLTLRWEPSS

SEQ ID NO: 88 - protein, 278 aa, Homo sapiens
GSHSMRYFYTSVSRPGRGEPRFIAVGYVDDTQFVRFDSDAASRRMEPRAPWIEQEGPEYWDGETRKVKAHSQTHRVDLGTLRGYYNQSEAGSHTLQRMYGCDVGSDWRFLRGYHQYAYDGKDYIALKEDLRSWTAADMAAQTTKHKWEAAHVAEQWRAYLEGTCVEWLRRYLENGKETLQRTDAPKTHMTHHAVSDHEATLRCWALSFYPAEITLTWQRDGEDQTQDTELVETRPAGDGTFQKWAAVVVPSGQEQRYTCHVQHEGLPKPLTLRWEPSS

SEQ ID NO: 89 - protein, 278 aa, Homo sapiens
GSHSMRYFYTAMSRPGRGEPRFIAVGYVDDTQFVRFDSDAASPREEPRAPWIEQEGPEYWDRNTQIYKAQAQTDRESLRNLRGYYNQSEAGSHTWQTMYGCDLGPDGRLLRGHNQLAYDGKDYIALNEDLSSWTAADTAAQITQRKWEAAREAEQLRAYLEGTCVEWLRRYLENGKETLQRADPPKTHVTHHPISDHEATLRCWALGFYPAEITLTWQRDGEDQTQDTELVETRPAGDRTFQKWAAVVVPSGEEQRYTCHVQHEGLPKPLTLRWEPSS

SEQ ID NO: 90 - protein, 278 aa, Homo sapiens
GSHSMRYFHTAMSRPGRGEPRFITVGYVDDTLFVRFDSDATSPRKEPRAPWIEQEGPEYWDRETQISKTNTQTYRESLRNLRGYYNQSEAGSHTWQRMYGCDLGPDGRLLRGYNQLAYDGKDYIALNEDLSSWTAADTAAQITQRKWEAARVAEQDRAYLEGLCVESLRRYLENGKETLQRADPPKTHVTHHPISDHEATLRCWALGFYPAEITLTWQRDGEDQTQDTELVETRPAGDRTFQKWAAVVVPSGEEQRYTCHVQHEGLPKPLTLRWEPSS

SEQ ID NO: 91 - protein, 278 aa, Homo sapiens
GSHSMRYFYTAMSRPGRGEPRFIAVGYVDDTQFVRFDSDAASPRTEPRAPWIEQEGPEYWDRETQISKTNTQTYRENLRIALRYYNQSEAGSHTWQTMYGCDVGPDGRLLRGHNQYAYDGKDYIALNEDLSSWTAADTAAQITQRKWEAAREAEQLRAYLEGLCVEWLRRHLENGKETLQRADPPKTHVTHHPVSDHEATLRCWALGFYPAEITLTWQRDGEDQTQDTELVETRPAGDRTFQKWAAVVVPSGEEQRYTCHVQHEGLPKPLTLRWEPSS

SEQ ID NO: 92 - protein, 278 aa, Homo sapiens
CSHSMRYFYTAVSRPGRGEPRFIAVGYVDDTQFVRFDSDAASPRGEPRAPWVEQEGPEYWDRETQKYKRQAQADRVSLRNLRGYYNQSEAGSHTLQRMYGCDLGPDGRLLRGYDQSAYDGKDYIALNEDLRSWTAADTAAQITQRKWEAAREAEQWRAYLEGTCVEWLRRYLENGKETLQRAEHPKTHVTHHPVSDHEATLRCWALGFYPAEITLTWQRDGEDQTQDTELVETRPAGDGTFQKWAAVVVPSGEEQRYTCHVQHEGLPEPLTLRWEPSS

SEQ ID NO: 93 - protein, 278 aa, Homo sapiens
GSHSMRYFYTAMSRPGRGEPRFIAVGYVDDTQFVRFDSDAASPRTEPRAPWIEQEGPEYWDRNTQIFKTNTQTYRESLRNLRGYYNQSEAGSHIIQRMYGCDLGPDGRLLRGHDQFAYDGKDYIALNEDLSSWTAADTAAQITQRKWEAARVAEQLRAYLEGLCVEWLRRYLENGKETLQRADPPKTHVTHHPVSDHEATLRCWALGFYPAEITLTWQRDGEDQTQDTELVETRPAGDRTFQKWAAVVVPSGEEQRYTCHVQHEGLPKPLTLRWEPSS

SEQ ID NO: 94 - protein, 278 aa, Homo sapiens
GSHSMRYFHTSVSRPGRGEPRFITVGYVDDTLFVRFDSDATSPRKEPRAPWIEQEGPEYWDRETQISKTNTQTYRESLRNLRGYYNQSEAGSHTLQSMYGCDVGPDGRLLRGHNQYAYDGKDYIALNEDLRSWTAADTAAQITQRKWEAARVAEQLRAYLEGECVEWLRRYLENGKETLQRADPPKTHVTHHPISDHEATLRCWALGFYPAEITLTWQRDGEDQTQDTELVETRPAGDRTFQKWAAVVVPSGEEQRYTCHVQHEGLPKPLTLRWEPSS

SEQ ID NO: 95 - protein, 278 aa, Homo sapiens
GSHSMRYFYTAMSRPGRGEPRFISVGYVDDTQFVRFDSDAASPREEPRAPWIEQEGPEYWDRETQISKTNTQTYRESLRNLRGYYNQSEAGSHTLQRMYGCDVGPDGRLLRGHDQSAYDGKDYIALNEDLSSWTAADTAAQITQRKWEAAREAEQLRAYLEGLCVEWLRRYLENGKETLQRADPPKTHVTHHPISDHEATLRCWALGFYPAEITLTWQRDGEDQTQDTELVETRPAGDRTFQKWAAVVVPSGEEQRYTCHVQHEGLPKPLTLRWEPSS

SEQ ID NO: 96 - protein, 278 aa, Homo sapiens
GSHSMRYFFTSVSRPGRGEPRFIAVGYVDDTQFVRFDSDAASQRMEPRAPWIEQEGPEYWDQETRNVKAHSQTDRVDLGTLRGYYNQSEAGSHTIQMMYGCDVGPDGRLLRGYQQDAYDGKDYIALNEDLRSWTAADMAAQITQRKWEAARVAEQLRAYLEGTCVEWLRRYLENGKETLQRTDAPKTHMTHHAVSDHEATLRCWALSFYPAEITLTWQRDGEDQTQDTELVETRPAGDGTFQKWASVVVPSGQEQRYTCHVQHEGLPKPLTLRWEPSS

SEQ ID NO: 97 - protein, 191 aa, Homo sapiens; identical to SEQ ID NO: 13

SEQ ID NO: 98 - protein, 198 aa, Homo sapiens
GDTRPRFLWQLKFECHFFNGTERVRLLERCIYNQEESVRFDSDVGEYRAVTELGRPDAEYWNSQKDLLEQRRAAVDTYCRHNYGVGESFTVQRRVEPKVTVYPSKTQPLQHHNLLVCSVSGFYPGSIEVRWFRNGQEEKAGVVSTGLIQNGDWTFQTLVMLETVPRSGEVYTCQVEHPSVTSPLTVEWRARSESAQSK

SEQ ID NO: 99 - protein, 198 aa, Homo sapiens
GDTRPRFLWQLKFECHFFNGTERVRLLERCIYNQEESVRFDSDVGEYRAVTELGRPDAEYWNSQKDLLEQRRAAVDTYCRHNYGAVESFTVQRRVEPKVTVYPSKTQPLQHHNLLVCSVSGFYPGSIEVRWFRNGQEEKAGVVSTGLIQNGDWTFQTLVMLETVPRSGEVYTCQVEHPSVTSPLTVEWRARSESAQSK

SEQ ID NO: 100 - protein, 198 aa, Homo sapiens
GDTRPRFLEYSTSECHFFNGTERVRYLDRYFHNQEENVRFDSDVGEFRAVTELGRPDAEYWNSQKDLLEQKRGRVDNYCRHNYGVVESFTVQRRVHPKVTVYPSKTQPLQHHNLLVCSVSGFYPGSIEVRWFRNGQEEKTGVVSTGLIHNGDWTFQTLVMLETVPRSGEVYTCQVEHPSVTSPLTVEWRARSESAQSK

SEQ ID NO: 101 - protein, 198 aa, Homo sapiens
GDTRPRFLEQVKHECHFFNGTERVRFLDRYFYHQEEYVRFDSDVGEYRAVTELGRPDAEYWNSQKDLLEQKRAAVDTYCRHNYGVGESFTVQRRVYPEVTVYPAKTQPLQHHNLLVCSVNGFYPGSIEVRWFRNGQEEKTGVVSTGLIQNGDWTFQTLVMLETVPRSGEVYTCQVEHPSLTSPLTVEWRARSESAQSK

SEQ ID NO: 102 - protein, 198 aa, Homo sapiens
GDTRPRFLEQVKHECHFFNGTERVRFLDRYFYHQEEYVRFDSDVGEYRAVTELGRPDAEYWNSQKDLLEQRRAAVDTYCRHNYGVVESFTVQRRVYPEVTVYPAKTQPLQHHNLLVCSVNGFYPGSIEVRWFRNGQEEKTGVVSTGLIQNGDWTFQTLVMLETVPRSGEVYTCQVEHPSLTSPLTVEWRARSESAQSK

SEQ ID NO: 103 - protein, 198 aa, Homo sapiens
GDTQPRFLWQGKYKCHFFNGTERVQFLERLFYNQEEFVRFDSDVGEYRAVTELGRPVAESWNSQKDILEDRRGQVDTVCRHNYGVGESFTVQRRVHPEVTVYPAKTQPLQHHNLLVCSVSGFYPGSIEVRWFRNGQEEKAGVVSTGLIQNGDWTFQTLVMLETVPRSGEVYTCQVEHPSVMSPLTVEWRARSESAQSK

SEQ ID NO: 104 - protein, 198 aa, Homo sapiens
GDTRPRFLEYSTGECYFFNGTERVRFLDRYFYNQEEYVRFDSDVGEYRAVTELGRPSAEYWNSQKDFLEDRRALVDTYCRHNYGVGESFTVQRRVHPKVTVYPSKTQPLQHHNLLVCSVSGFYPGSIEVRWFRNGQEEKTGVVSTGLIHNGDWTFQTLVMLETVPRSGEVYTCQVEHPSVTSPLTVEWSARSESAQSK

SEQ ID NO: 105 - protein, 198 aa, Homo sapiens
GDTRPRFLEEVKFECHFFNGTERVRLLERRVHNQEEYARYDSDVGEYRAVTELGRPDAEYWNSQKDLLERRRAAVDTYCRHNYGVGESFTVQRRVQPKVTVYPSKTQPLQHHNLLVCSVNGFYPGSIEVRWFRNGQEEKTGVVSTGLIQNGDWTFQTLVMLETVPQSGEVYTCQVEHPSVMSPLTVEWRARSESAQSK

SEQ ID NO: 106 - protein, 198 aa, Homo sapiens
GDTRPRFLEYSTSECHFFNGTERVRFLDRYFYNQEEYVRFDSDVGEFRAVTELGRPDEEYWNSQKDFLEDRRAAVDTYCRHNYGVGESFTVQRRVHPKVTVYPSKTQPLQHHNLLVCSVSGFYPGSIEVRWFRNGQEEKTGVVSTGLIHNGDWTFQTLVMLETVPRSGEVYTCQVEHPSVTSPLTVEWRARSESAQSK

SEQ ID NO: 107 - protein, 198 aa, Homo sapiens
GDTRPRFLEYSTSECHFFNGTERVRFLDRYFYNQEEYVRFDSDVGEFRAVTELGRPDEEYWNSQKDFLEDRRAAVDTYCRHNYGVVESFTVQRRVHPKVTVYPSKTQPLQHHNLLVCSVSGFYPGSIEVRWFRNGQEEKTGVVSTGLIHNGDWTFQTLVMLETVPRSGEVYTCQVEHPSVTSPLTVEWRARSESAQSK

SEQ ID NO: 108 - protein, 198 aa, Homo sapiens
GDTRPRFLEYSTSECHFFNGTERVRFLDRYFHNQEENVRFDSDVGEFRAVTELGRPDAEYWNSQKDILEDERAAVDTYCRHNYGVVESFTVQRRVHPKVTVYPSKTQPLQHHNLLVCSVSGFYPGSIEVRWFRNGQEEKTGVVSTGLIHNGDWTFQTLVMLETVPRSGEVYTCQVEHPSVTSPLTVEWRARSESAQSK

SEQ ID NO: 109 - protein, 198 aa, Homo sapiens
GDTRPRFLEYSTSECHFFNGTERVRFLDRYFHNQEENVRFDSDVGEFRAVTELGRPDAEYWNSQKDILEDERAAVDTYCRHNYGVGESFTVQRRVHPKVTVYPSKTQPLQHHNLLVCSVSGFYPGSIEVRWFRNGQEEKTGVVSTGLIHNGDWTFQTLVMLETVPRSGEVYTCQVEHPSVTSPLTVEWRARSESAQSK

SEQ ID NO: 110 - protein, 198 aa, Homo sapiens
GDTRPRFLEYSTSECHFFNGTERVRFLDRYFHNQEEFVRFDSDVGEYRAVTELGRPAAEHWNSQKDLLERRRAEVDTYCRHNYGVVESFTVQRRVHPKVTVYPSKTQPLQHYNLLVCSVSGFYPGSIEVRWFRNGQEEKTGVVSTGLIHNGDWTFQTLVMLETVPRSGEVYTCQVEHPSVTSPLTVEWRARSESAQSK

SEQ ID NO: 111 - protein, 198 aa, Homo sapiens
GDTRPRFLWQPKRECHFFNGTERVRFLDRYFYNQEESVRFDSDVGEFRAVTELGRPDAEYWNSQKDILEQARAAVDTYCRHNYGVVESFTVQRRVQPKVTVYPSKTQPLQHHNLLVCSVSGFYPGSIEVRWFLNGQEEKAGMVSTGLIQNGDWTFQTLVMLETVPRSGEVYTCQVEHPSVTSPLTVEWRARSESAQSK

SEQ ID NO: 112 - protein, 198 aa, Homo sapiens
GDTRPRFLWQPKRECHFFNGTERVRFLDRHFYNQEESVRFDSDVGEFRAVTELGRPDAEYWNSQKDILEQARAAVDTYCRHNYGVVESFTVQRRVQPKVTVYPSKTQPLQHHNLLVCSVSGFYPGSIEVRWFLNGQEEKAGMVSTGLIQNGDWTFQTLVMLETVPRSGEVYTCQVEHPSVTSPLTVEWRARSESAQSK

SEQ ID NO: 113 - protein, 195 aa, Homo sapiens
EDIVADHVASCGVNLYQFYGPSGQYTHEFDGDEEFYVDLERKETAWRWPEFSKFGGFDPQGALRNMAVAKHNLNIMIKRYNSTAATNEVPEVTVFSKSPVTLGQPNTLICLVDNIFPPVVNITWLSNGQSVTEGVSETSFLSKSDHSFFKISYLTFLPSADEIYDCKVEHWGLDQPLLKHWEPEIPAPMSELTET

SEQ ID NO: 114 - protein, 199 aa, Homo sapiens
GRDSPEDFVYQFKGLCYFTNGTERVRGVTRHIYNREEYVRFDSDVGVYRAVTPQGRPVAEYWNSQKEVLEGARASVDRVCRHNYEVAYRGILQRRVEPTVTISPSRTEALNHHNLLICSVTDFYPSQIKVRWFRNDQEETAGVVSTPLIRNGDWTFQILVMLEMTPQRGDVYTCHVEHPSLQSPITVEWRAQSESAQSK

SEQ ID NO: 115 - protein, 195 aa, Homo sapiens
EDIVADHVASCGVNLYQFYGPSGQYTHEFDGDEQFYVDLERKETAWRWPEFSKFGGFDPQGALRNMAVAKHNLNIMIKRYNSTAATNEVPEVTVFSKSPVTLGQPNTLICLVDNIFPPVVNITWLSNGQSVTEGVSETSFLSKSDHSFFKISYLTFLPSADEIYDCKVEHWGLDQPLLKHWEPEIPAPMSELTET

SEQ ID NO: 116 - protein, 199 aa, Homo sapiens
GRDSPEDFVFQFKGMCYFTNGTERVRLVTRYIYNREEYARFDSDVGVYRAVTPQGRPDAEYWNSQKEVLEGTRAELDTVCRHNYEVAFRGILQRRVEPTVTISPSRTEALNHHNLLVCSVTDFYPGQIKVRWFRNDQEETAGVVSTPLIRNGDWTFQILVMLEMTPQRGDVYTCHVEHPSLQSPITVEWRAQSESAQSK

SEQ ID NO: 117 - protein, 195 aa, Homo sapiens
EDIVADHVASYGVNLYQSYGPSGQYSHEFDGDEEFYVDLERKETVWQLPLFRRFRRFDPQFALTNIAVLKHNLNIVIKRSNSTAATNEVPEVTVFSKSPVTLGQPNTLICLVDNIFPPVVNITWLSNGHSVTEGVSETSFLSKSDHSFFKISYLTFLPSADEIYDCKVEHWGLDEPLLKHWEPEIPTPMSELTET

SEQ ID NO: 118 - protein, 199 aa, Homo sapiens
GRDSPEDFVYQFKGMCYFTNGTERVRLVTRYIYNREEYARFDSDVGVYRAVTPLGPPAAEYWNSQKEVLERTRAELDTVCRHNYQLELRTTLQRRVEPTVTISPSRTEALNHHNLLVCSVTDFYPAQIKVRWFRNDQEETTGVVSTPLIRNGDWTFQILVMLEMTPQRGDVYTCHVEHPSLQNPIIVEWRAQSESAQSK

SEQ ID NO: 119 - protein, 194 aa, Homo sapiens
EDIVADHVASYGVNLYQSYGPSGQYTHEFDGDEQFYVDLGRKETVWCLPVLRQFRFDPQFALTNIAVLKHNLNSLIKRSNSTAATNEVPEVTVFSKSPVTLGQPNILICLVDNIFPPVVNITWLSNGHSVTEGVSETSFLSKSDHSFFKISYLTLLPSAEESYDCKVEHWGLDKPLLKHWEPEIPAPMSELTET

SEQ ID NO: 120 - protein, 199 aa, Homo sapiens
GRDSPEDFVYQFKGMCYFTNGTERVRLVSRSIYNREEIVRFDSDVGEFRAVTLLGLPAAEYWNSQKDILERKRAAVDRVCRHNYQLELRTTLQRRVEPTVTISPSRTEALNHHNLLVCSVTDFYPAQIKVRWFRNDQEETAGVVSTPLIRNGDWTFQILVMLEMTPQRGDVYTCHVEHPSLQSPITVEWRAQSESAQSK

SEQ ID NO: 121 - protein, 199 aa, Homo sapiens
GRDSPEDFVYQFKAMCYFTNGTERVRYVTRYIYNREEYARFDSDVEVYRAVTPLGPPDAEYWNSQKEVLERTRAELDTVCRHNYQLELRTTLQRRVEPTVTISPSRTEALNHHNLLVCSVTDFYPAQIKVRWFRNDQEETTGVVSTPLIRNGDWTFQILVMLEMTPQHGDVYTCHVEHPSLQNPITVEWRAQSESAQSK

SEQ ID NO: 122 - protein, 199 aa, Homo sapiens
GRDSPEDFVYQFKGMCYFTNGTERVRLVTRYIYNREEYARFDSDVGVYRAVTPLGPPDAEYWNSQKEVLERTRAELDTVCRHNYQLELRTTLQRRVEPTVTISPSRTEALNHHNLLVCSVTDFYPAQIKVRWFRNDQEETTGVVSTPLIRNGDWTFQILVMLEMTPQRGDVYTCHVEHPSLQNPIIVEWRAQSESAQSK

SEQ ID NO: 123 - protein, 199 aa, Homo sapiens
GRDSPEDFVFQFKGMCYFTNGTERVRGVTRYIYNREEYARFDSDVGVYRAVTPLGRLDAEYWNSQKDILEEDRASVDTVCRHNYQLELRTTLQRRVEPTVTISPSRTEALNHHNLLVCSVTDFYPAQIKVRWFRNDQEETTGVVSTPLIRNGDWTFQILVMLEMTPQRGDVYTCHVEHPSLQNPIIVEWRAQSESAQSK

SEQ ID NO: 124 - protein, 199 aa, Homo sapiens
GRDSPEDFVYQFKGLCYFTNGTERVRGVTRHIYNREEYVRFDSDVGVYRAVTPQGRPDAEYWNSQKEVLEGARASVDRVCRHNYEVAYRGILQRRVEPTVTISPSRTEALNHHNLLICSVTDFYPSQIKVRWFRNDQEETAGVVSTPLIRNGDWTFQILVMLEMTPQRGDVYTCHVEHPSLQSPITVEWRAQSESAQSK

SEQ ID NO: 125 - protein, 199 aa, Homo sapiens
GRDSPEDFVYQFKGMCYFTNGTERVRLVTRHIYNREEYARFDSDVGVYRAVTPQGRPDAEYWNSQKEVLEGTRAELDTVCRHNYEVAFRGILQRRVEPTVTISPSRTEALNHHNLLVCSVTDFYPGQIKVRWFRNDQEETAGVVSTPLIRNGDWTFQILVMLEMTPQRGDVYTCHVEHPSLQSPITVEWRAQSESAQSK

SEQ ID NO: 126 - protein, 199 aa, Homo sapiens
GRDSPEDFVYQFKGMCYFTNGTERVRLVTRHIYNREEYARFDSDVGVYRAVTPQGRPVAEYWNSQKEVLERTRAELDTVCRHNYEVGYRGILQRRVEPTVTISPSRTEALNHHNLLVCSVTDFYPGQIKVQWFRNDQEETAGVVSTPLIRNGDWTFQILVMLEMTPQRGDVYTCHVEHPSLQSPITVEWRAQSESAQSK

SEQ ID NO: 127 - protein, 348 aa, Unknown
  Description of Unknown: IgM Cm2-Cm3-Cm4-TP sequence
IAELPPKVSVFVPPRDGFFGNPRKSKLICQATGFSPRQIQVSWLREGKQVGSGVTTDQVQAEAKESGPTTYKVTSTLTIKESDWLGQSMFTCRVDHRGLTFQQNASSMCVPDQDTAIRVFAIPPSFASIFLTKSTKLTCLVTDLTTYDSVTISWTRQNGEAVKTHTNISESHPNATFSAVGEASICEDDWNSGERFTCTVTHTDLPSPLKQTISRPKGVALHRPDVYLLPPAREQLNLRESATITCLVTGFSPADVFVQWMQRGQPLSPEKYVTSAPMPEPQAPGRYFAHSILTVSEEEWNTGETYTCVVAHEALPNRVTERTVDKSTGKPTLYNVSLVMSDTAGTCY

SEQ ID NO: 128 - protein, 232 aa, Unknown
  Description of Unknown: IgM Cm3-Cm4-TP sequence
IRVFAIPPSFASIFLTKSTKLTCLVTDLTTYDSVTISWTRQNGEAVKTHTNISESHPNATFSAVGEASICEDDWNSGERFTCTVTHTDLPSPLKQTISRPKGVALHRPDVYLLPPAREQLNLRESATITCLVTGFSPADVFVQWMQRGQPLSPEKYVTSAPMPEPQAPGRYFAHSILTVSEEEWNTGETYTCVVAHEALPNRVTERTVDKSTGKPTLYNVSLVMSDTAGTCY

SEQ ID NO: 129 - protein, 18 aa, Homo sapiens
PTLYNVSLVMSDTAGTCY

SEQ ID NO: 130 - protein, 18 aa, Homo sapiens
PTHVNVSVVMAEVDGTCY

SEQ ID NO: 131 - protein, 15 aa, Artificial Sequence
  Description of Artificial Sequence: Synthetic peptide
GGGGSGGGGSGGGGS

SEQ ID NO: 132 - protein, 22 aa, Artificial Sequence
  Description of Artificial Sequence: Synthetic peptide
GSAPKPAPKPAPAPKPAPKPAP

SEQ ID NO: 133 - protein, 40 aa, Artificial Sequence
  Description of Artificial Sequence: Synthetic polypeptide
GGGGSGGGGSGGGGSGGGGSAPKPAPKPAPAPKPAPKPAP

SEQ ID NO: 134 - protein, 30 aa, Artificial Sequence
  Description of Artificial Sequence: Synthetic polypeptide
  SITE (1)..(30): This sequence may encompass 1-6 "Gly Gly Gly Gly Ser" repeating units
GGGGSGGGGSGGGGSGGGGSGGGGSGGGGS

SEQ ID NO: 135 - protein, 13 aa, Artificial Sequence
  Description of Artificial Sequence: Synthetic peptide
SSSSGSSSSGSAA

SEQ ID NO: 136 - protein, 5 aa, Artificial Sequence
  Description of Artificial Sequence: Synthetic peptide
GGGGG

SEQ ID NO: 137 - protein, 51 aa, Artificial Sequence
  Description of Artificial Sequence: Synthetic polypeptide
  SITE (2)..(51): This region may encompass 1-10 "Gly Gly Gly Gly Ser" repeating units
SGGGGSGGGGSGGGGSGGGGSGGGGSGGGGSGGGGSGGGGSGGGGSGGGGS

SEQ ID NO: 138 - protein, 20 aa, Artificial Sequence
  Description of Artificial Sequence: Synthetic peptide
  SITE (1)..(20): This sequence may encompass 1-5 "Gly Gly Ser Gly" repeating units
GGSGGGSGGGSGGGSGGGSG

SEQ ID NO: 139 - protein, 4 aa, Artificial Sequence
  Description of Artificial Sequence: Synthetic peptide
GSAT

SEQ ID NO: 140 - protein, 30 aa, Artificial Sequence
  Description of Artificial Sequence: Synthetic polypeptide
  SITE (1)..(30): This sequence may encompass 1-5 "Gly Gly Ser Gly Gly Ser" repeating units
GGSGGSGGSGGSGGSGGSGGSGGSGGSGGS

SEQ ID NO: 141 - protein, 20 aa, Artificial Sequence
  Description of Artificial Sequence: Synthetic peptide
GGGGSGGGGSGGGGSGGGGS

SEQ ID NO: 142 - protein, 14 aa, Artificial Sequence
  Description of Artificial Sequence: Synthetic peptide
GSGSAGGSGSGGGS

SEQ ID NO: 143 - protein, 8 aa, Artificial Sequence
  Description of Artificial Sequence: Synthetic peptide
DYKDDDDK

SEQ ID NO: 144 - protein, 6 aa, Artificial Sequence
  Description of Artificial Sequence: Synthetic 6xHis tag
HHHHHH

SEQ ID NO: 145 - protein, 14 aa, Artificial Sequence
  Description of Artificial Sequence: Synthetic peptide
GKPIPNPLLGLDST

SEQ ID NO: 146 - protein, 8 aa, Artificial Sequence
  Description of Artificial Sequence: Synthetic peptide
WSHPQFEK

SEQ ID NO: 147 - protein, 12 aa, Artificial Sequence
  Description of Artificial Sequence: Synthetic peptide
EDQVDPRLIDGK

SEQ ID NO: 148 - protein, 10 aa, Artificial Sequence
  Description of Artificial Sequence: Synthetic peptide
EQKLISEEDL

SEQ ID NO: 149 - protein, 28 aa, Artificial Sequence
  Description of Artificial Sequence: Synthetic peptide
GLNDIFEAQKIEWHEGSGEQKLISEEDL

SEQ ID NO: 150 - protein, 34 aa, Artificial Sequence
  Description of Artificial Sequence: Synthetic polypeptide
GLNDIFEAQKIEWHEGSGEQKLISEEDLHHHHHH

SEQ ID NO: 151 - protein, 40 aa, Artificial Sequence
  Description of Artificial Sequence: Synthetic polypeptide
GSGSAGGGLNDIFEAQKIEWHEGSTGHHHHHHDYKDDDDK

SEQ ID NO: 152 - protein, 39 aa, Unknown
  Description of Unknown: Fos sequence
LTDTLQAETDQLEDEKSALQTEIANLLKEKEKLEFILAA

SEQ ID NO: 153 - protein, 40 aa, Unknown
  Description of Unknown: Jun sequence
RIARLEEKVKTLKAQNSELASTANMLREQVAQLKQKVMNH

SEQ ID NO: 154 - protein, 35 aa, Unknown
  Description of Unknown: acidic leucine zipper sequence
TTAPSAQLEKELQALQKENAQLEWELQALEKELAQ

SEQ ID NO: 155 - protein, 35 aa, Unknown
  Description of Unknown: basic leucine zipper sequence
TTAPSAQLKKKLQALKKKNAQLKWKLQALKKKLAQ

SEQ ID NO: 156 - protein, 232 aa, Artificial Sequence
  Description of Artificial Sequence: Synthetic polypeptide
EPKSADKTHTCPPCPAPEAAGGPSVFLFPPKPKDTLMISRTPEVTCVVVDVSHEDPEVKFNWYVDGVEVHNAKTKPREEQYNSTYRVVSVLTVLHQDWLNGKEYKCKVSNKALGAPIEKTISKAKGQPREPQVYTLPPCRDELTKNQVSLWCLVKGFYPSDIAVEWESNGQPENNYKTTPPVLDSDGSFFLYSKLTVDKSRWQQGNVFSCSVMHEALHNHYTQKSLSLSPGK

SEQ ID NO: 157 - protein, 232 aa, Artificial Sequence
  Description of Artificial Sequence: Synthetic polypeptide
EPKSADKTHTCPPCPAPEAAGGPSVFLFPPKPKDTLMISRTPEVTCVVVDVSHEDPEVKFNWYVDGVEVHNAKTKPREEQYNSTYRVVSVLTVLHQDWLNGKEYKCKVSNKALGAPIEKTISKAKGQPREPQVCTLPPSRDELTKNQVSLSCAVKGFYPSDIAVEWESNGQPENNYKTTPPVLDSDGSFFLVSKLTVDKSRWQQGNVFSCSVMHEALHNHYTQKSLSLSPGK

SEQ ID NO: 158 - protein, 16 aa, Artificial Sequence
  Description of Artificial Sequence: Synthetic peptide
RGVPHIVMVDAYKRYK

SEQ ID NO: 159 - protein, 113 aa, Artificial Sequence
  Description of Artificial Sequence: Synthetic polypeptide
VTTLSGLSGEQGPSGDMTTEEDSATHIKFSKRDEDGRELAGATMELRDSSGKTISTWISDGHVKDFYLYPGKYTFVETAAPDGYEVATPIEFTVNEDGQVTVDGEATEGDAHT

SEQ ID NO: 160 - protein, 10 aa, Human papillomavirus
YMLDLQPETT

SEQ ID NO: 161 - protein, 9 aa, Human alphaherpesvirus 1
SLPITVYYA

SEQ ID NO: 162 - protein, 9 aa, Homo sapiens
RMFPNAPYL

SEQ ID NO: 163 - protein, 9 aa, Unknown
  Description of Unknown: HLA-A2-binding peptide
KILGFVFTV

SEQ ID NO: 164 - protein, 9 aa, Unknown
  Description of Unknown: HLA-A2-binding peptide
GILGFVFTL

SEQ ID NO: 165 - protein, 9 aa, Unknown
  Description of Unknown: A1:01-binding peptide
VTEHDTLLY

SEQ ID NO: 166 - protein, 9 aa, Unknown
  Description of Unknown: A3:01-binding peptide
TVRSHCVSK

SEQ ID NO: 167 - protein, 9 aa, Unknown
  Description of Unknown: A11:01-binding peptide
TTFLQTMLR

SEQ ID NO: 168 - protein, 10 aa, Unknown
  Description of Unknown: A24:02-binding peptide
RYPLTFGWCF

SEQ ID NO: 169 - protein, 11 aa, Unknown
  Description of Unknown: B7:02-binding peptide
RPHERNGFTVL

SEQ ID NO: 170 - protein, 9 aa, Unknown
  Description of Unknown: B35:01-binding peptide
IPSINVHHY

SEQ ID NO: 171 - protein, 10 aa, Unknown
  Description of Unknown: C3:04-binding peptide
FVYGGSKTSL

SEQ ID NO: 172 - protein, 9 aa, Unknown
  Description of Unknown: B8:01-binding peptide
FLRGRAYGL

SEQ ID NO: 173 - protein, 9 aa, Unknown
  Description of Unknown: C7:02-binding peptide
RYRPGTVAL

SEQ ID NO: 174 - protein, 9 aa, Unknown
  Description of Unknown: C4:01-binding peptide
QYDPVAALF

SEQ ID NO: 175 - protein, 9 aa, Unknown
  Description of Unknown: B15:01-binding peptide
GQFLTPNSH

SEQ ID NO: 176 - protein, 9 aa, Unknown
  Description of Unknown: B40:01-binding peptide
KEVNSQLSL

SEQ ID NO: 177 - protein, 9 aa, Unknown
  Description of Unknown: B58:01-binding peptide
VSFIEFVGW

SEQ ID NO: 178 - protein, 9 aa, Unknown
  Description of Unknown: C8:02-binding peptide
IAPWYAFAL

SEQ ID NO: 179 - protein, 8 aa, Artificial Sequence
  Description of Artificial Sequence: Synthetic peptide
  MOD_RES (2)..(2): Any amino acid
  MOD_RES (4)..(4): Any amino acid
DXEXNPGP

SEQ ID NO: 180 - protein, 18 aa, Thosea asigna virus
EGRGSLLTCGDVEENPGP

SEQ ID NO: 181 - protein, 19 aa, Porcine teschovirus
ATNFSLLKQAGDVEENPGP

SEQ ID NO: 182 - protein, 20 aa, Equine rhinitis A virus
QCTNYALLKLAGDVESNPGP

SEQ ID NO: 183 - protein, 22 aa, Foot-and-mouth disease virus
VKQTLNFDLLKLAGDVESNPGP

SEQ ID NO: 184 - protein, 20 aa, Artificial Sequence
  Description of Artificial Sequence: Synthetic peptide
MEAPAQLLFLLLLWLPDTTG

SEQ ID NO: 185 - protein, 23 aa, Homo sapiens
MNRGVPFRHLLLVLQLALLPAAT

SEQ ID NO: 186 - protein, 20 aa, Mus sp.
METDTLLLWVLLLWVPGSTG

SEQ ID NO: 187 - protein, 21 aa, Mus sp.
MVPCTLLLLLAAALAPTQTRA

SEQ ID NO: 188 - protein, 18 aa, Homo sapiens
MKWVTFISLLFLFSSAYS

SEQ ID NO: 189 - protein, 20 aa, Homo sapiens
MYRMQLLSCIALSLALVTNS

SEQ ID NO: 190 - protein, 24 aa, Homo sapiens
MAVMAPRTLLLLLSGALALTQTWA

SEQ ID NO: 191 - protein, 20 aa, Homo sapiens
MSRSVALAVLALLSLSGLEA

SEQ ID NO: 192 - protein, 6 aa, Unknown
  Description of Unknown: Sortase recognition peptide
LPETGG

SEQ ID NO: 193 - protein, 348 aa, Artificial Sequence
  Description of Artificial Sequence: Synthetic polypeptide
IAELPPKVSVFVPPRDGFFGNPRKSKLICQATGFSPRQIQVSWLREGKQVGSGVTTDQVQAEAKESGPTTYKVTSTLTIKESDWLGQSMFTCRVDHRGLTFQQNASSMCVPDQDTAIRVFAIPPSFASIFLTKSTKLTCLVTDLTTYDSVTISWTRQNGEAVKTHTNISESHPNATFSAVGEASICEDDWNSGERFTCTVTHTDDPSPLKQTISRPKGVALHRPDVYLLPPAREQLNLRESATITCLVTGFSPADVFVQWMQRGQPLSPEKYVTSAPMPEPQAPGRYFAHSILTVSEEEWNTGETYTCVVAHEALPNRVTERTVDKSTGKPTLYNVSLVMSDTAGTCY

SEQ ID NO: 194 - protein, 232 aa, Artificial Sequence
  Description of Artificial Sequence: Synthetic polypeptide
IRVFAIPPSFASIFLTKSTKLTCLVTDLTTYDSVTISWTRQNGEAVKTHTNISESHPNATFSAVGEASICEDDWNSGERFTCTVTHTDDPSPLKQTISRPKGVALHRPDVYLLPPAREQLNLRESATITCLVTGFSPADVFVQWMQRGQPLSPEKYVTSAPMPEPQAPGRYFAHSILTVSEEEWNTGETYTCVVAHEALPNRVTERTVDKSTGKPTLYNVSLVMSDTAGTCY

SEQ ID NO: 195 - protein, 348 aa, Artificial Sequence
  Description of Artificial Sequence: Synthetic polypeptide
IAELPPKVSVFVPPRDGFFGNPRKSKLICQATGFSPRQIQVSWLREGKQVGSGVTTDQVQAEAKESGPTTYKVTSTLTIKESDWLGQSMFTCRVDHRGLTFQQNASSMCVPDQDTAIRVFAIPPSFASIFLTKSTKLTCLVTDLTTYDSVTISWTRQNGEAVKTHTNISESHPNATFSAVGEASICEDDWNSGERFTCTVTHTDLASSLKQTISRPKGVALHRPDVYLLPPAREQLNLRESATITCLVTGFSPADVFVQWMQRGQPLSPEKYVTSAPMPEPQAPGRYFAHSILTVSEEEWNTGETYTCVVAHEALPNRVTERTVDKSTGKPTLYNVSLVMSDTAGTCY

SEQ ID NO: 196 - protein, 232 aa, Artificial Sequence
  Description of Artificial Sequence: Synthetic polypeptide
IRVFAIPPSFASIFLTKSTKLTCLVTDLTTYDSVTISWTRQNGEAVKTHTNISESHPNATFSAVGEASICEDDWNSGERFTCTVTHTDLASSLKQTISRPKGVALHRPDVYLLPPAREQLNLRESATITCLVTGFSPADVFVQWMQRGQPLSPEKYVTSAPMPEPQAPGRYFAHSILTVSEEEWNTGETYTCVVAHEALPNRVTERTVDKSTGKPTLYNVSLVMSDTAGTCY

SEQ ID NO: 197 - protein, 348 aa, Artificial Sequence
  Description of Artificial Sequence: Synthetic polypeptide
IAELPPKVSVFVPPRDGFFGNPRKSKLICQATGFSPRQIQVSWLREGKQVGSGVTTDQVQAEAKESGPTTYKVTSTLTIKESDWLGQSMFTCRVDHRGLTFQQNASSMCVPDQDTAIRVFAIPPSFASIFLTKSTKLTCLVTDLTTYDSVTISWTRQNGEAVKTHTNISESHPNATFSAVGEASICEDDWNSGERFTCTVTHTDLGSPLKQTISRPKGVALHRPDVYLLPPAREQLNLRESATITCLVTGFSPADVFVQWMQRGQPLSPEKYVTSAPMPEPQAPGRYFAHSILTVSEEEWNTGETYTCVVAHEALPNRVTERTVDKSTGKPTLYNVSLVMSDTAGTCY

SEQ ID NO: 198 - protein, 232 aa, Artificial Sequence
  Description of Artificial Sequence: Synthetic polypeptide
IRVFAIPPSFASIFLTKSTKLTCLVTDLTTYDSVTISWTRQNGEAVKTHTNISESHPNATFSAVGEASICEDDWNSGERFTCTVTHTDLGSPLKQTISRPKGVALHRPDVYLLPPAREQLNLRESATITCLVTGFSPADVFVQWMQRGQPLSPEKYVTSAPMPEPQAPGRYFAHSILTVSEEEWNTGETYTCVVAHEALPNRVTERTVDKSTGKPTLYNVSLVMSDTAGTCY

SEQ ID NO: 199 - protein, 785 aa, Artificial Sequence
  Description of Artificial Sequence: Synthetic polypeptide
ELAGIGILTVGGGGSGGGGSGGGGSIQRTPKIQVYSRHPAENGKSNFLNCYVSGFHPSDIEVDLLKNGERIEKVEHSDLSFSKDWSFYLLYYTEFTPTEKDEYACRVNHVTLSQPKIVKWDRDMGGGGSGGGGSGGGGSGGGGSGSHSMRYFFTSVSRPGRGEPRFIAVGYVDDTQFVRFDSDAASQRMEPRAPWIEQEGPEYWDGETRKVKAHSQTHRVDLGTLRGAYNQSEAGSHTVQRMYGCDVGSDWRFLRGYHQYAYDGKDYIALKEDLRSWTAADMAAQTTKHKWEAAHVAEQLRAYLEGTCVEWLRRYLENGKETLQRTDAPKTHMTHHAVSDHEATLRCWALSFYPAEITLTWQRDGEDQTQDTELVETRPAGDGTFQKWAAVVVPSGQEQRYTCHVQHEGLPKPLTLRWEPSSGGGGSGGGGSGGGGSIAELPPKVSVFVPPRDGFFGNPRKSKLICQATGFSPRQIQVSWLREGKQVGSGVTTDQVQAEAKESGPTTYKVTSTLTIKESDWLGQSMFTCRVDHRGLTFQQNASSMCVPDQDTAIRVFAIPPSFASIFLTKSTKLTCLVTDLTTYDSVTISWTRQNGEAVKTHTNISESHPNATFSAVGEASICEDDWNSGERFTCTVTHTDDPSPLKQTISRPKGVALHRPDVYLLPPAREQLNLRESATITCLVTGFSPADVFVQWMQRGQPLSPEKYVTSAPMPEPQAPGRYFAHSILTVSEEEWNTGETYTCVVAHEALPNRVTERTVDKSTGKPTLYNVSLVMSDTAGTCY

SEQ ID NO: 200 - protein, 669 aa, Artificial Sequence
  Description of Artificial Sequence: Synthetic polypeptide
ELAGIGILTVGGGGSGGGGSGGGGSIQRTPKIQVYSRHPAENGKSNFLNCYVSGFHPSDIEVDLLKNGERIEKVEHSDLSFSKDWSFYLLYYTEFTPTEKDEYACRVNHVTLSQPKIVKWDRDMGGGGSGGGGSGGGGSGGGGSGSHSMRYFFTSVSRPGRGEPRFIAVGYVDDTQFVRFDSDAASQRMEPRAPWIEQEGPEYWDGETRKVKAHSQTHRVDLGTLRGAYNQSEAGSHTVQRMYGCDVGSDWRFLRGYHQYAYDGKDYIALKEDLRSWTAADMAAQTTKHKWEAAHVAEQLRAYLEGTCVEWLRRYLENGKETLQRTDAPKTHMTHHAVSDHEATLRCWALSFYPAEITLTWQRDGEDQTQDTELVETRPAGDGTFQKWAAVVVPSGQEQRYTCHVQHEGLPKPLTLRWEPSSGGGGSGGGGSGGGGSIRVFAIPPSFASIFLTKSTKLTCLVTDLTTYDSVTISWTRQNGEAVKTHTNISESHPNATFSAVGEASICEDDWNSGERFTCTVTHTDDPSPLKQTISRPKGVALHRPDVYLLPPAREQLNLRESATITCLVTGFSPADVFVQWMQRGQPLSPEKYVTSAPMPEPQAPGRYFAHSILTVSEEEWNTGETYTCVVAHEALPNRVTERTVDKSTGKPTLYNVSLVMSDTAGTCY

SEQ ID NO: 201 - protein, 785 aa, Artificial Sequence
  Description of Artificial Sequence: Synthetic polypeptide
ELAGIGILTVGGGGSGGGGSGGGGSIQRTPKIQVYSRHPAENGKSNFLNCYVSGFHPSDIEVDLLKNGERIEKVEHSDLSFSKDWSFYLLYYTEFTPTEKDEYACRVNHVTLSQPKIVKWDRDMGGGGSGGGGSGGGGSGGGGSGSHSMRYFFTSVSRPGRGEPRFIAVGYVDDTQFVRFDSDAASQRMEPRAPWIEQEGPEYWDGETRKVKAHSQTHRVDLGTLRGAYNQSEAGSHTVQRMYGCDVGSDWRFLRGYHQYAYDGKDYIALKEDLRSWTAADMAAQTTKHKWEAAHVAEQLRAYLEGTCVEWLRRYLENGKETLQRTDAPKTHMTHHAVSDHEATLRCWALSFYPAEITLTWQRDGEDQTQDTELVETRPAGDGTFQKWAAVVVPSGQEQRYTCHVQHEGLPKPLTLRWEPSSGGGGSGGGGSGGGGSIAELPPKVSVFVPPRDGFFGNPRKSKLICQATGFSPRQIQVSWLREGKQVGSGVTTDQVQAEAKESGPTTYKVTSTLTIKESDWLGQSMFTCRVDHRGLTFQQNASSMCVPDQDTAIRVFAIPPSFASIFLTKSTKLTCLVTDLTTYDSVTISWTRQNGEAVKTHTNISESHPNATFSAVGEASICEDDWNSGERFTCTVTHTDLASSLKQTISRPKGVALHRPDVYLLPPAREQLNLRESATITCLVTGFSPADVFVQWMQRGQPLSPEKYVTSAPMPEPQAPGRYFAHSILTVSEEEWNTGETYTCVVAHEALPNRVTERTVDKSTGKPTLYNVSLVMSDTAGTCY

SEQ ID NO: 202 - protein, 669 aa, Artificial Sequence
  Description of Artificial Sequence: Synthetic polypeptide
ELAGIGILTVGGGGSGGGGSGGGGSIQRTPKIQVYSRHPAENGKSNFLNCYVSGFHPSDIEVDLLKNGERIEKVEHSDLSFSKDWSFYLLYYTEFTPTEKDEYACRVNHVTLSQPKIVKWDRDMGGGGSGGGGSGGGGSGGGGSGSHSMRYFFTSVSRPGRGEPRFIAVGYVDDTQFVRFDSDAASQRMEPRAPWIEQEGPEYWDGETRKVKAHSQTHRVDLGTLRGAYNQSEAGSHTVQRMYGCDVGSDWRFLRGYHQYAYDGKDYIALKEDLRSWTAADMAAQTTKHKWEAAHVAEQLRAYLEGTCVEWLRRYLENGKETLQRTDAPKTHMTHHAVSDHEATLRCWALSFYPAEITLTWQRDGEDQTQDTELVETRPAGDGTFQKWAAVVVPSGQEQRYTCHVQHEGLPKPLTLRWEPSSGGGGSGGGGSGGGGSIRVFAIPPSFASIFLTKSTKLTCLVTDLTTYDSVTISWTRQNGEAVKTHTNISESHPNATFSAVGEASICEDDWNSGERFTCTVTHTDLASSLKQTISRPKGVALHRPDVYLLPPAREQLNLRESATITCLVTGFSPADVFVQWMQRGQPLSPEKYVTSAPMPEPQAPGRYFAHSILTVSEEEWNTGETYTCVVAHEALPNRVTERTVDKSTGKPTLYNVSLVMSDTAGTCY

SEQ ID NO: 203 - protein, 785 aa, Artificial Sequence
  Description of Artificial Sequence: Synthetic polypeptide
ELAGIGILTVGGGGSGGGGSGGGGSIQRTPKIQVYSRHPAENGKSNFLNCYVSGFHPSDIEVDLLKNGERIEKVEHSDLSFSKDWSFYLLYYTEFTPTEKDEYACRVNHVTLSQPKIVKWDRDMGGGGSGGGGSGGGGSGGGGSGSHSMRYFFTSVSRPGRGEPRFIAVGYVDDTQFVRFDSDAASQRMEPRAPWIEQEGPEYWDGETRKVKAHSQTHRVDLGTLRGAYNQSEAGSHTVQRMYGCDVGSDWRFLRGYHQYAYDGKDYIALKEDLRSWTAADMAAQTTKHKWEAAHVAEQLRAYLEGTCVEWLRRYLENGKETLQRTDAPKTHMTHHAVSDHEATLRCWALSFYPAEITLTWQRDGEDQTQDTELVETRPAGDGTFQKWAAVVVPSGQEQRYTCHVQHEGLPKPLTLRWEPSSGGGGSGGGGSGGGGSIAELPPKVSVFVPPRDGFFGNPRKSKLICQATGFSPRQIQVSWLREGKQVGSGVTTDQVQAEAKESGPTTYKVTSTLTIKESDWLGQSMFTCRVDHRGLTFQQNASSMCVPDQDTAIRVFAIPPSFASIFLTKSTKLTCLVTDLTTYDSVTISWTRQNGEAVKTHTNISESHPNATFSAVGEASICEDDWNSGERFTCTVTHTDLGSPLKQTISRPKGVALHRPDVYLLPPAREQLNLRESATITCLVTGFSPADVFVQWMQRGQPLSPEKYVTSAPMPEPQAPGRYFAHSILTVSEEEWNTGETYTCVVAHEALPNRVTERTVDKSTGKPTLYNVSLVMSDTAGTCY

SEQ ID NO: 204 - protein, 669 aa, Artificial Sequence
  Description of Artificial Sequence: Synthetic polypeptide
ELAGIGILTVGGGGSGGGGSGGGGSIQRTPKIQVYSRHPAENGKSNFLNCYVSGFHPSDIEVDLLKNGERIEKVEHSDLSFSKDWSFYLLYYTEFTPTEKDEYACRVNHVTLSQPKIVKWDRDMGGGGSGGGGSGGGGSGGGGSGSHSMRYFFTSVSRPGRGEPRFIAVGYVDDTQFVRFDSDAASQRMEPRAPWIEQEGPEYWDGETRKVKAHSQTHRVDLGTLRGAYNQSEAGSHTVQRMYGCDVGSDWRFLRGYHQYAYDGKDYIALKEDLRSWTAADMAAQTTKHKWEAAHVAEQLRAYLEGTCVEWLRRYLENGKETLQRTDAPKTHMTHHAVSDHEATLRCWALSFYPAEITLTWQRDGEDQTQDTELVETRPAGDGTFQKWAAVVVPSGQEQRYTCHVQHEGLPKPLTLRWEPSSGGGGSGGGGSGGGGSIRVFAIPPSFASIFLTKSTKLTCLVTDLTTYDSVTISWTRQNGEAVKTHTNISESHPNATFSAVGEASICEDDWNSGERFTCTVTHTDLGSPLKQTISRPKGVALHRPDVYLLPPAREQLNLRESATITCLVTGFSPADVFVQWMQRGQPLSPEKYVTSAPMPEPQAPGRYFAHSILTVSEEEWNTGETYTCVVAHEALPNRVTERTVDKSTGKPTLYNVSLVMSDTAGTCY

SEQ ID NO: 205 - protein, 252 aa, Artificial Sequence
  Description of Artificial Sequence: Synthetic polypeptide
IKEEHVIIQAEFYLNPDQSGEFMFDFDGDEIFHVDMAKKETVWRLEEFGRFASFEAQGALANIAVDKANLEIMTKRSNYTPITNVPPEVTVLTNSPVELREPNVLICFIDKFTPPVVNVTWLRNGKPVTTGVSETVFLPREDHLFRKFHYLPFLPSTEDVYDCRVEHWGLDEPLLKHWEFDAPSPLPETTEGGGGSGGGGSIARLEEKVKTLKAQNYELASTANMLREQVAQLGAPGSGSGSEQKLISEEDL

SEQ ID NO: 206 - protein, 203 aa, Artificial Sequence
  Description of Artificial Sequence: Synthetic polypeptide
IKEEHVIIQAEFYLNPDQSGEFMFDFDGDEIFHVDMAKKETVWRLEEFGRFASFEAQGALANIAVDKANLEIMTKRSNYTPITNVPPEVTVLTNSPVELREPNVLICFIDKFTPPVVNVTWLRNGKPVTTGVSETVFLPREDHLFRKFHYLPFLPSTEDVYDCRVEHWGLDEPLLKHWEFDAPSPLPETTEGSEQKLISEEDL

SEQ ID NO: 207 - protein, 624 aa, Artificial Sequence
  Description of Artificial Sequence: Synthetic polypeptide
MSQIMYNYPAMMAHAGGGGSGGGGSGSGDTRPRFLWQPKRECHFFNGTERVRFLDRYFYNQEESVRFDSDVGEFRAVTELGRPDAEYWNSQKDILEQARAAVDTYCRHNYGVVESFTVQRRVQPKVTVYPSKTQPLQHHNLLVCSVSGFYPGSIEVRWFLNGQEEKAGMVSTGLIQNGDWTFQTLVMLETVPRSGEVYTCQVEHPSVTSPLTVEWRARSESAQSKGGGGSGGGGSLDELQAEIEQLEERNYALRKEIEDLQKQLEKLGAPGGGGSGIAELPPKVSVFVPPRDGFFGNPRKSKLICQATGFSPRQIQVSWLREGKQVGSGVTTDQVQAEAKESGPTTYKVTSTLTIKESDWLGQSMFTCRVDHRGLTFQQNASSMCVPDQDTAIRVFAIPPSFASIFLTKSTKLTCLVTDLTTYDSVTISWTRQNGEAVKTHTNISESHPNATFSAVGEASICEDDWNSGERFTCTVTHTDLPSPLKQTISRPKGVALHRPDVYLLPPAREQLNLRESATITCLVTGFSPADVFVQWMQRGQPLSPEKYVTSAPMPEPQAPGRYFAHSILTVSEEEWNTGETYTCVVAHEALPNRVTERTVDKSTGKPTLYNVSLVMSDTAGTCY

SEQ ID NO: 208 - protein, 623 aa, Artificial Sequence
  Description of Artificial Sequence: Synthetic polypeptide
ENPVVHFFKNIVTPGGGGSGGGGSGSGDTRPRFLWQPKRECHFFNGTERVRFLDRYFYNQEESVRFDSDVGEFRAVTELGRPDAEYWNSQKDILEQARAAVDTYCRHNYGVVESFTVQRRVQPKVTVYPSKTQPLQHHNLLVCSVSGFYPGSIEVRWFLNGQEEKAGMVSTGLIQNGDWTFQTLVMLETVPRSGEVYTCQVEHPSVTSPLTVEWRARSESAQSKGGGGSGGGGSLDELQAEIEQLEERNYALRKEIEDLQKQLEKLGAPGGGGSGIAELPPKVSVFVPPRDGFFGNPRKSKLICQATGFSPRQIQVSWLREGKQVGSGVTTDQVQAEAKESGPTTYKVTSTLTIKESDWLGQSMFTCRVDHRGLTFQQNASSMCVPDQDTAIRVFAIPPSFASIFLTKSTKLTCLVTDLTTYDSVTISWTRQNGEAVKTHTNISESHPNATFSAVGEASICEDDWNSGERFTCTVTHTDLPSPLKQTISRPKGVALHRPDVYLLPPAREQLNLRESATITCLVTGFSPADVFVQWMQRGQPLSPEKYVTSAPMPEPQAPGRYFAHSILTVSEEEWNTGETYTCVVAHEALPNRVTERTVDKSTGKPTLYNVSLVMSDTAGTCY

SEQ ID NO: 209 - protein, 620 aa, Artificial Sequence
  Description of Artificial Sequence: Synthetic polypeptide
RFYKTLRAEQASQGSGGGGSGGGGSGDTRPRFLWQPKRECHFFNGTERVRFLDRYFYNQEESVRFDSDVGEFRAVTELGRPDAEYWNSQKDILEQARAAVDTYCRHNYGVGESFTVQRRVQPKVTVYPSKTQPLQHHNLLVCSVSGFYPGSIEVRWFLNGQEEKAGMVSTGLIQNGDWTFQTLVMLETVPRSGEVYTCQVEHPSVTSPLTVEWRARSESAQSKGGGGSGGGGSLDELQAEIEQLEERNYALRKEIEDLQKQLEKLGAPGSGSIAELPPKVSVFVPPRDGFFGNPRKSKLICQATGFSPRQIQVSWLREGKQVGSGVTTDQVQAEAKESGPTTYKVTSTLTIKESDWLGQSMFTCRVDHRGLTFQQNASSMCVPDQDTAIRVFAIPPSFASIFLTKSTKLTCLVTDLTTYDSVTISWTRQNGEAVKTHTNISESHPNATFSAVGEASICEDDWNSGERFTCTVTHTDLPSPLKQTISRPKGVALHRPDVYLLPPAREQLNLRESATITCLVTGFSPADVFVQWMQRGQPLSPEKYVTSAPMPEPQAPGRYFAHSILTVSEEEWNTGETYTCVVAHEALPNRVTERTVDKSTGKPTLYNVSLVMSDTAGTCY

SEQ ID NO: 210 - protein, 593 aa, Artificial Sequence
  Description of Artificial Sequence: Synthetic polypeptide
FRDYVDRFYKTLRAEQASQEGGGGSIEGRGSGGGSGDTRPRFLWQPKRECHFFNGTERVRFLDRYFYNQEESVRFDSDVGEFRAVTELGRPDAEYWNSQKDILEQARAAVDTYCRHNYGVGESFTVQRRVQPKVTVYPSKTQPLQHHNLLVCSVSGFYPGSIEVRWFLNGQEEKAGMVSTGLIQNGDWTFQTLVMLETVPRSGEVYTCQVEHPSVTSPLTVEWRARSESAQSKGGGGSGGGGSGSIAELPPKVSVFVPPRDGFFGNPRKSKLICQATGFSPRQIQVSWLREGKQVGSGVTTDQVQAEAKESGPTTYKVTSTLTIKESDWLGQSMFTCRVDHRGLTFQQNASSMCVPDQDTAIRVFAIPPSFASIFLTKSTKLTCLVTDLTTYDSVTISWTRQNGEAVKTHTNISESHPNATFSAVGEASICEDDWNSGERFTCTVTHTDLPSPLKQTISRPKGVALHRPDVYLLPPAREQLNLRESATITCLVTGFSPADVFVQWMQRGQPLSPEKYVTSAPMPEPQAPGRYFAHSILTVSEEEWNTGETYTCVVAHEALPNRVTERTVDKSTGKPTLYNVSLVMSDTAGTCY

SEQ ID NO: 211 - protein, 590 aa, Artificial Sequence
  Description of Artificial Sequence: Synthetic polypeptide
FRDYVDRFYKTLRAEQASQEGSGGGGSGGGGSGDTRPRFLWQPKRECHFFNGTERVRFLDRYFYNQEESVRFDSDVGEFRAVTELGRPDAEYWNSQKDILEQARAAVDTYCRHNYGVGESFTVQRRVQPKVTVYPSKTQPLQHHNLLVCSVSGFYPGSIEVRWFLNGQEEKAGMVSTGLIQNGDWTFQTLVMLETVPRSGEVYTCQVEHPSVTSPLTVEWRARSESAQSKGGGGSGGGGSGSIAELPPKVSVFVPPRDGFFGNPRKSKLICQATGFSPRQIQVSWLREGKQVGSGVTTDQVQAEAKESGPTTYKVTSTLTIKESDWLGQSMFTCRVDHRGLTFQQNASSMCVPDQDTAIRVFAIPPSFASIFLTKSTKLTCLVTDLTTYDSVTISWTRQNGEAVKTHTNISESHPNATFSAVGEASICEDDWNSGERFTCTVTHTDLPSPLKQTISRPKGVALHRPDVYLLPPAREQLNLRESATITCLVTGFSPADVFVQWMQRGQPLSPEKYVTSAPMPEPQAPGRYFAHSILTVSEEEWNTGETYTCVVAHEALPNRVTERTVDKSTGKPTLYNVSLVMSDTAGTCY

SEQ ID NO: 212 - protein, 485 aa, Artificial Sequence
  Description of Artificial Sequence: Synthetic polypeptide
FRDYVDRFYKTLRAEQASQEGSGGGGSGGGGSGDTRPRFLWQPKRECHFFNGTERVRFLDRYFYNQEESVRFDSDVGEFRAVTELGRPDAEYWNSQKDILEQARAAVDTYCRHNYGVGESFTVQRRVQPKVTVYPSKTQPLQHHNLLVCSVSGFYPGSIEVRWFLNGQEEKAGMVSTGLIQNCDWTFQTLVMLETVPRSGEVYTCQVEHPSVTSPLTVEWRARSESAQSKGGGGSGGGGSGGGGSCVPDQDTAIRVFAIPPSFASIFLTKSTKLTCLVTDLTTYDSVTISWTRQNGEAVKTHTNISESHPNATFSAVGEASICEDDWNSGERFTCTVTHTDLPSPLKQTISRPKGVALHRPDVYLLPPAREQLNLRESATITCLVTGFSPADVFVQWMQRGQPLSPEKYVTSAPMPEPQAPGRYFAHSILTVSEEEWNTGETYTCVVAHEALPNRVTERTVDKSTGKPTLYNVSLVMSDTAGTCY

SEQ ID NO: 213 - protein, 627 aa, Artificial Sequence
  Description of Artificial Sequence: Synthetic polypeptide
FRDYVDRFYKTLRAEQASQEGSGGGGSGGGGSGDTRPRFLWQPKRECHFFNGTERVRFLDRYFYNQEESVRFDSDVGEFRAVTELGRPDAEYWNSQKDILEQARAAVDTYCRHNYGVGESFTVQRRVQPKVTVYPSKTQPLQHHNLLVCSVSGFYPGSIEVRWFLNGQEEKAGMVSTGLIQNGDWTFQTLVMLETVPRSGEVYTCQVEHPSVTSPLTVEWRARSESAQSKGGGGSGGGGSLDELQAEIEQLEERNYALRKEIEDLQKQLEKLGAPGSGSIAELPPKVSVFVPPRDGFFGNPRKSKLICQATGFSPRQIQVSWLREGKQVGSGVTTDQVQAEAKESGPTTYKVTSTLTIKESDWLGQSMFTCRVDHRGLTFQQNASSMCVPDQDTAIRVFAIPPSFASIFLTKSTKLTCLVTDLTTYDSVTISWTRQNGEAVKTHTNISESHPNATFSAVGEASICEDDWNSGERFTCTVTHTDLPSPLKQTISRPKGVALHRPDVYLLPPAREQLNLRESATITCLVTGFSPADVFVQWMQRGQPLSPEKYVTSAPMPEPQAPGRYFAHSILTVSEEEWNTGETYTCVVAHEALPNRVTERTVDKSTGKPTLYNVSLVMSDTAGTCY

SEQ ID NO: 214 - protein, 622 aa, Artificial Sequence
  Description of Artificial Sequence: Synthetic polypeptide
RFYKTLRAEQASQGGGGSGGGGSGSGDTRPRFLWQLKFECHFFNGTERVRLLERCIYNQEESVRFDSDVGEYRAVTELGRPDAEYWNSQKDLLEQRRAAVDTYCRHNYGVGESFTVQRRVEPKVTVYPSKTQPLQHHNLLVCSVSGFYPGSIEVRWFRNGQEEKAGVVSTGLIQNGDWTFQTLVMLETVPRSGEVYTCQVEHPSVTSPLTVEWRARSESAQSKGGGGSGGGGSLDELQAEIEQLEERNYALRKEIEDLQKQLEKLGAPGGGGSGIAELPPKVSVFVPPRDGFFGNPRKSKLICQATGFSPRQIQVSWLREGKQVGSGVTTDQVQAEAKESGPTTYKVTSTLTIKESDWLGQSMFTCRVDHRGLTFQQNASSMCVPDQDTAIRVFAIPPSFASIFLTKSTKLTCLVTDLTTYDSVTISWTRQNGEAVKTHTNISESHPNATFSAVGEASICEDDWNSGERFTCTVTHTDLPSPLKQTISRPKGVALHRPDVYLLPPAREQLNLRESATITCLVTGFSPADVFVQWMQRGQPLSPEKYVTSAPMPEPQAPGRYFAHSILTVSEEEWNTGETYTCVVAHEALPNRVTERTVDKSTGKPTLYNVSLVMSDTAGTCY

SEQ ID NO: 215 - protein, 586 aa, Artificial Sequence
  Description of Artificial Sequence: Synthetic polypeptide
RFYKTLRAEQASQGGGGSGGGGSGSGDTRPRFLWQLKFECHFFNGTERVRLLERCIYNQEESVRFDSDVGEYRAVTELGRPDAEYWNSQKDLLEQRRAAVDTYCRHNYGVGESFTVQRRVEPKVTVYPSKTQPLQHHNLLVCSVSGFYPGSIEVRWFRNGQEEKAGVVSTGLIQNGDWTFQTLVMLETVPRSGEVYTCQVEHPSVTSPLTVEWRARSESAQSKGGGGSGGGGSGGGGSIAELPPKVSVFVPPRDGFFGNPRKSKLICQATGFSPRQIQVSWLREGKQVGSGVTTDQVQAEAKESGPTTYKVTSTLTIKESDWLGQSMFTCRVDHRGLTFQQNASSMCVPDQDTAIRVFAIPPSFASIFLTKSTKLTCLVTDLTTYDSVTISWTRQNGEAVKTHTNISESHPNATFSAVGEASICEDDWNSGERFTCTVTHTDLPSPLKQTISRPKGVALHRPDVYLLPPAREQLNLRESATITCLVTGFSPADVFVQWMQRGQPLSPEKYVTSAPMPEPQAPGRYFAHSILTVSEEEWNTGETYTCVVAHEALPNRVTERTVDKSTGKPTLYNVSLVMSDTAGTCY

SEQ ID NO: 216 - protein, 248 aa, Artificial Sequence
  Description of Artificial Sequence: Synthetic polypeptide
IKEEHVIIQAEFYLNPDQSGEFMFDFDGDEIFHVDMAKKETVWRLEEFGRFASFEAQGALANIAVDKANLECMTKRSNYTPITNVPPEVTVLTNSPVELREPNVLICFIDKFTPPVVNVTWLRNGKPVTTGVSETVFLPREDHLFRKFHYLPFLPSTEDVYDCRVEHWGLDEPLLKHWEFDAPSPLPETTEGGGGSGGGGSIARLEEKVKTLKAQNYELASTANMLREQVAQLGAPGSEQKLISEEDL

SEQ ID NO: 217 - protein, 203 aa, Artificial Sequence
  Description of Artificial Sequence: Synthetic polypeptide
IKEEHVIIQAEFYLNPDQSGEFMFDFDGDEIFHVDMAKKETVWRLEEFGRFASFEAQGALANIAVDKANLECMTKRSNYTPITNVPPEVTVLTNSPVELREPNVLICFIDKFTPPVVNVTWLRNGKPVTTGVSETVFLPREDHLFRKFHYLPFLPSTEDVYDCRVEHWGLDEPLLKHWEFDAPSPLPETTEGSEQKLISEEDL

SEQ ID NO: 218 - protein, 624 aa, Artificial Sequence
  Description of Artificial Sequence: Synthetic polypeptide
MSQIMYNYPAMMAHCGGGGSGGGGSGSGDTRPRFLWQPKRECHFFNGTERVRFLDRYFYNQEESVRFDSDVGEFRAVTELGRPDAEYWNSQKDILEQARAAVDTYCRHNYGVVESFTVQRRVQPKVTVYPSKTQPLQHHNLLVCSVSGFYPGSIEVRWFLNGQEEKAGMVSTGLIQNGDWTFQTLVMLETVPRSGEVYTCQVEHPSVTSPLTVEWRARSESAQSKGGGGSGGGGSLDELQAEIEQLEERNYALRKEIEDLQKQLEKLGAPGGGGSGIAELPPKVSVFVPPRDGFFGNPRKSKLICQATGFSPRQIQVSWLREGKQVGSGVTTDQVQAEAKESGPTTYKVTSTLTIKESDWLGQSMFTCRVDHRGLTFQQNASSMCVPDQDTAIRVFAIPPSFASIFLTKSTKLTCLVTDLTTYDSVTISWTRQNGEAVKTHTNISESHPNATFSAVGEASICEDDWNSGERFTCTVTHTDLPSPLKQTISRPKGVALHRPDVYLLPPAREQLNLRESATITCLVTGFSPADVFVQWMQRGQPLSPEKYVTSAPMPEPQAPGRYFAHSILTVSEEEWNTGETYTCVVAHEALPNRVTERTVDKSTGKPTLYNVSLVMSDTAGTCY

SEQ ID NO: 219 - protein, 587 aa, Artificial Sequence
  Description of Artificial Sequence: Synthetic polypeptide
RFYKTLRAEQASQCGGGGSGGGGSGSGDTRPRFLWQLKFECHFFNGTERVRLLERCIYNQEESVRFDSDVGEYRAVTELGRPDAEYWNSQKDLLEQRRAAVDTYCRHNYGVGESFTVQRRVEPKVTVYPSKTQPLQHHNLLVCSVSGFYPGSIEVRWFRNGQEEKAGVVSTGLIQNGDWTFQTLVMLETVPRSGEVYTCQVEHPSVTSPLTVEWRARSESAQSKGGGGSGGGGSGGGGSIAELPPKVSVFVPPRDGFFGNPRKSKLICQATGFSPRQIQVSWLREGKQVGSGVTTDQVQAEAKESGPTTYKVTSTLTIKESDWLGQSMFTCRVDHRGLTFQQNASSMCVPDQDTAIRVFAIPPSFASIFLTKSTKLTCLVTDLTTYDSVTISWTRQNGEAVKTHTNISESHPNATFSAVGEASICEDDWNSGERFTCTVTHTDLPSPLKQTISRPKGVALHRPDVYLLPPAREQLNLRESATITCLVTGFSPADVFVQWMQRGQPLSPEKYVTSAPMPEPQAPGRYFAHSILTVSEEEWNTGETYTCVVAHEALPNRVTERTVDKSTGKPTLYNVSLVMSDTAGTCY

SEQ ID NO: 220 - protein, 623 aa, Artificial Sequence
  Description of Artificial Sequence: Synthetic polypeptide
ENPVVHFFKNIVTCGGGGSGGGGSGSGDTRPRFLWQPKRECHFFNGTERVRFLDRYFYNQEESVRFDSDVGEFRAVTELGRPDAEYWNSQKDILEQARAAVDTYCRHNYGVVESFTVQRRVQPKVTVYPSKTQPLQHHNLLVCSVSGFYPGSIEVRWFLNGQEEKAGMVSTGLIQNGDWTFQTLVMLETVPRSGEVYTCQVEHPSVTSPLTVEWRARSESAQSKGGGGSGGGGSLDELQAEIEQLEERNYALRKEIEDLQKQLEKLGAPGGGGSGIAELPPKVSVFVPPRDGFFGNPRKSKLICQATGFSPRQIQVSWLREGKQVGSGVTTDQVQAEAKESGPTTYKVTSTLTIKESDWLGQSMFTCRVDHRGLTFQQNASSMCVPDQDTAIRVFAIPPSFASIFLTKSTKLTCLVTDLTTYDSVTISWTRQNGEAVKTHTNISESHPNATFSAVGEASICEDDWNSGERFTCTVTHTDLPSPLKQTISRPKGVALHRPDVYLLPPAREQLNLRESATITCLVTGFSPADVFVQWMQRGQPLSPEKYVTSAPMPEPQAPGRYFAHSILTVSEEEWNTGETYTCVVAHEALPNRVTERTVDKSTGKPTLYNVSLVMSDTAGTCY

SEQ ID NO: 221 - protein, 302 aa, Artificial Sequence
  Description of Artificial Sequence: Synthetic polypeptide
ENPVVHFFKNIVTPGGGGSGGGGSGSGDTRPRFLWQPKRECHFFNGTERVRFLDRYFYNQEESVRFDSDVGEFRAVTELGRPDAEYWNSQKDILEQARAAVDTYCRHNYGVVESFTVQRRVQPKVTVYPSKTQPLQHHNLLVCSVSGFYPGSIEVRWFLNGQEEKAGMVSTGLIQNGDWTFQTLVMLETVPRSGEVYTCQVEHPSVTSPLTVEWRARSESAQSKGGGGSGGGGSLDELQAEIEQLEERNYALRKEIEDLQKQLEKLGAPGSGLNDIFEAQKIEWHEGSLPETGGHHHHHHHH

SEQ ID NO: 222 - protein, 303 aa, Artificial Sequence
  Description of Artificial Sequence: Synthetic polypeptide
MSQIMYNYPAMMAHAGGGGSGGGGSGSGDTRPRFLWQPKRECHFFNGTERVRFLDRYFYNQEESVRFDSDVGEFRAVTELGRPDAEYWNSQKDILEQARAAVDTYCRHNYGVVESFTVQRRVQPKVTVYPSKTQPLQHHNLLVCSVSGFYPGSIEVRWFLNGQEEKAGMVSTGLIQNGDWTFQTLVMLETVPRSGEVYTCQVEHPSVTSPLTVEWRARSESAQSKGGGGSGGGGSLDELQAEIEQLEERNYALRKEIEDLQKQLEKLGAPGSGLNDIFEAQKIEWHEGSLPETGGHHHHHHHH

SEQ ID NO: 223 - protein, 301 aa, Artificial Sequence
  Description of Artificial Sequence: Synthetic polypeptide
RFYKTLRAEQASQGGGGSGGGGSGSGDTRPRFLWQLKFECHFFNGTERVRLLERCIYNQEESVRFDSDVGEYRAVTELGRPDAEYWNSQKDLLEQRRAAVDTYCRHNYGVGESFTVQRRVEPKVTVYPSKTQPLQHHNLLVCSVSGFYPGSIEVRWFRNGQEEKAGVVSTGLIQNGDWTFQTLVMLETVPRSGEVYTCQVEHPSVTSPLTVEWRARSESAQSKGGGGSGGGGSLDELQAEIEQLEERNYALRKEIEDLQKQLEKLGAPGSGLNDIFEAQKIEWHEGSLPETGGHHHHHHHH

SEQ ID NO: 224 - protein, 303 aa, Artificial Sequence
  Description of Artificial Sequence: Synthetic polypeptide
VKQIKVRVDMVRHRIGGGGSGGGGSGSGDTRPRFLEYSTSECHFFNGTERVRYLDRYFHNQEENVRFDSDVGEFRAVTELGRPDAEYWNSQKDLLEQKRGRVDNYCRHNYGVVESFTVQRRVHPKVTVYPSKTQPLQHHNLLVCSVSGFYPGSIEVRWFRNGQEEKTGVVSTGLIHNGDWTFQTLVMLETVPRSGEVYTCQVEHPSVTSPLTVEWRARSESAQSKGGGGSGGGGSLDELQAEIEQLEERNYALRKEIEDLQKQLEKLGAPGSGLNDIFEAQKIEWHEGSLPETGGHHHHHHHH

SEQ ID NO: 225 - protein, 302 aa, Artificial Sequence
  Description of Artificial Sequence: Synthetic polypeptide
GPKYVKQNTLKLATGGGGSGGGGSGSGDTRPRFLEQVKHECHFFNGTERVRFLDRYFYHQEEYVRFDSDVGEYRAVTELGRPDAEYWNSQKDLLEQKRAAVDTYCRHNYGVGESFTVQRRVYPEVTVYPAKTQPLQHHNLLVCSVNGFYPGSIEVRWFRNGQEEKTGVVSTGLIQNGDWTFQTLVMLETVPRSGEVYTCQVEHPSLTSPLTVEWRARSESAQSKGGGGSGGGGSLDELQAEIEQLEERNYALRKEIEDLQKQLEKLGAPGSGLNDIFEAQKIEWHEGSLPETGGHHHHHHHH

SEQ ID NO: 226 - protein, 257 aa, Artificial Sequence
  Description of Artificial Sequence: Synthetic polypeptide
GPKYVKQNTLKLATGGGGSGGGGSGSGDTRPRFLEQVKHECHFFNGTERVRFLDRYFYHQEEYVRFDSDVGEYRAVTELGRPDAEYWNSQKDLLEQKRAAVDTYCRHNYGVGESFTVQRRVYPEVTVYPAKTQPLQHHNLLVCSVNGFYPGSIEVRWFRNGQEEKTGVVSTGLIQNGDWTFQTLVMLETVPRSGEVYTCQVEHPSLTSPLTVEWRARSESAQSKGSGLNDIFEAQKIEWHEGSLPETGGHHHHHHHH

SEQ ID NO: 227 - protein, 302 aa, Artificial Sequence
  Description of Artificial Sequence: Synthetic polypeptide
ENPVVHFFKNIVTCGGGGSGGGGSGSGDTRPRFLWQPKRECHFFNGTERVRFLDRYFYNQEESVRFDSDVGEFRAVTELGRPDAEYWNSQKDILEQARAAVDTYCRHNYGVVESFTVQRRVQPKVTVYPSKTQPLQHHNLLVCSVSGFYPGSIEVRWFLNGQEEKAGMVSTGLIQNGDWTFQTLVMLETVPRSGEVYTCQVEHPSVTSPLTVEWRARSESAQSKGGGGSGGGGSLDELQAEIEQLEERNYALRKEIEDLQKQLEKLGAPGSGLNDIFEAQKIEWHEGSLPETGGHHHHHHHH

SEQ ID NO: 228 - protein, 303 aa, Artificial Sequence
  Description of Artificial Sequence: Synthetic polypeptide
MSQIMYNYPAMMAHCGGGGSGGGGSGSGDTRPRFLWQPKRECHFFNGTERVRFLDRYFYNQEESVRFDSDVGEFRAVTELGRPDAEYWNSQKDILEQARAAVDTYCRHNYGVVESFTVQRRVQPKVTVYPSKTQPLQHHNLLVCSVSGFYPGSIEVRWFLNGQEEKAGMVSTGLIQNGDWTFQTLVMLETVPRSGEVYTCQVEHPSVTSPLTVEWRARSESAQSKGGGGSGGGGSLDELQAEIEQLEERNYALRKEIEDLQKQLEKLGAPGSGLNDIFEAQKIEWHEGSLPETGGHHHHHHHH

SEQ ID NO: 229 - protein, 258 aa, Artificial Sequence
  Description of Artificial Sequence: Synthetic polypeptide
VKQIKVRVDMVRHRCGGGGSGGGGSGSGDTRPRFLEYSTSECHFFNGTERVRYLDRYFHNQEENVRFDSDVGEFRAVTELGRPDAEYWNSQKDLLEQKRGRVDNYCRHNYGVVESFTVQRRVHPKVTVYPSKTQPLQHHNLLVCSVSGFYPGSIEVRWFRNGQEEKTGVVSTGLIHNGDWTFQTLVMLETVPRSGEVYTCQVEHPSVTSPLTVEWRARSESAQSKGSGLNDIFEAQKIEWHEGSLPETGGHHHHHHHH

SEQ ID NO: 230 - protein, 302 aa, Artificial Sequence
  Description of Artificial Sequence: Synthetic polypeptide
GPKYVKQNTLKLCTGGGGSGGGGSGSGDTRPRFLEQVKHECHFFNGTERVRFLDRYFYHQEEYVRFDSDVGEYRAVTELGRPDAEYWNSQKDLLEQKRAAVDTYCRHNYGVGESFTVQRRVYPEVTVYPAKTQPLQHHNLLVCSVNGFYPGSIEVRWFRNGQEEKTGVVSTGLIQNGDWTFQTLVMLETVPRSGEVYTCQVEHPSLTSPLTVEWRARSESAQSKGGGGSGGGGSLDELQAEIEQLEERNYALRKEIEDLQKQLEKLGAPGSGLNDIFEAQKIEWHEGSLPETGGHHHHHHHH

SEQ ID NO: 231 - protein, 257 aa, Artificial Sequence
  Description of Artificial Sequence: Synthetic polypeptide
GPKYVKQNTLKLACGGGGSGGGGSGSGDTRPRFLEQVKHECHFFNGTERVRFLDRYFYHQEEYVRFDSDVGEYRAVTELGRPDAEYWNSQKDLLEQKRAAVDTYCRHNYGVGESFTVQRRVYPEVTVYPAKTQPLQHHNLLVCSVNGFYPGSIEVRWFRNGQEEKTGVVSTGLIQNGDWTFQTLVMLETVPRSGEVYTCQVEHPSLTSPLTVEWRARSESAQSKGSGLNDIFEAQKIEWHEGSLPETGGHHHHHHHH

SEQ ID NO: 232 - protein, 8 aa, Artificial Sequence
  Description of Artificial Sequence: Synthetic 8xHis tag
HHHHHHHH

SEQ ID NO: 233 - protein, 9 aa, Artificial Sequence
  Description of Artificial Sequence: Synthetic peptide
NLVPMIATV

SEQ ID NO: 234 - protein, 15 aa, Mycobacterium tuberculosis
MTINYQFGDVDAHGA

SEQ ID NO: 235 - protein, 784 aa, Artificial Sequence
  Description of Artificial Sequence: Synthetic polypeptide
ALWEIQQVVGGGGSGGGGSGGGGSIQRTPKIQVYSRHPAENGKSNFLNCYVSGFHPSDIEVDLLKNGERIEKVEHSDLSFSKDWSFYLLYYTEFTPTEKDEYACRVNHVTLSQPKIVKWDRDMGGGGSGGGGSGGGGSGGGGSGSHSMRYFFTSVSRPGRGEPRFIAVGYVDDTQFVRFDSDAASQRMEPRAPWIEQEGPEYWDGETRKVKAHSQTHRVDLGTLRGAYNQSEAGSHTVQRMYGCDVGSDWRFLRGYHQYAYDGKDYIALKEDLRSWTAADMAAQTTKHKWEAAHVAEQLRAYLEGTCVEWLRRYLENGKETLQRTDAPKTHMTHHAVSDHEATLRCWALSFYPAEITLTWQRDGEDQTQDTELVETRPAGDGTFQKWAAVVVPSGQEQRYTCHVQHEGLPKPLTLRWEPSSGGGGSGGGGSGGGGSIAELPPKVSVFVPPRDGFFGNPRKSKLICQATGFSPRQIQVSWLREGKQVGSGVTTDQVQAEAKESGPTTYKVTSTLTIKESDWLGQSMFTCRVDHRGLTFQQNASSMCVPDQDTAIRVFAIPPSFASIFLTKSTKLTCLVTDLTTYDSVTISWTRQNGEAVKTHTNISESHPNATFSAVGEASICEDDWNSGERFTCTVTHTDLPSPLKQTISRPKGVALHRPDVYLLPPAREQLNLRESATITCLVTGFSPADVFVQWMQRGQPLSPEKYVTSAPMPEPQAPGRYFAHSILTVSEEEWNTGETYTCVVAHEALPNRVTERTVDKSTGKPTLYNVSLVMSDTAGTCY

SEQ ID NO: 236 - protein, 784 aa, Artificial Sequence
  Description of Artificial Sequence: Synthetic polypeptide
KLWAQCVQLGGGGSGGGGSGGGGSIQRTPKIQVYSRHPAENGKSNFLNCYVSGFHPSDIEVDLLKNGERIEKVEHSDLSFSKDWSFYLLYYTEFTPTEKDEYACRVNHVTLSQPKIVKWDRDMGGGGSGGGGSGGGGSGGGGSGSHSMRYFFTSVSRPGRGEPRFIAVGYVDDTQFVRFDSDAASQRMEPRAPWIEQEGPEYWDGETRKVKAHSQTHRVDLGTLRGAYNQSEAGSHTVQRMYGCDVGSDWRFLRGYHQYAYDGKDYIALKEDLRSWTAADMAAQTTKHKWEAAHVAEQLRAYLEGTCVEWLRRYLENGKETLQRTDAPKTHMTHHAVSDHEATLRCWALSFYPAEITLTWQRDGEDQTQDTELVETRPAGDGTFQKWAAVVVPSGQEQRYTCHVQHEGLPKPLTLRWEPSSGGGGSGGGGSGGGGSIAELPPKVSVFVPPRDGFFGNPRKSKLICQATGFSPRQIQVSWLREGKQVGSGVTTDQVQAEAKESGPTTYKVTSTLTIKESDWLGQSMFTCRVDHRGLTFQQNASSMCVPDQDTAIRVFAIPPSFASIFLTKSTKLTCLVTDLTTYDSVTISWTRQNGEAVKTHTNISESHPNATFSAVGEASICEDDWNSGERFTCTVTHTDLPSPLKQTISRPKGVALHRPDVYLLPPAREQLNLRESATITCLVTGFSPADVFVQWMQRGQPLSPEKYVTSAPMPEPQAPGRYFAHSILTVSEEEWNTGETYTCVVAHEALPNRVTERTVDKSTGKPTLYNVSLVMSDTAGTCY

SEQ ID NO: 237 - protein, 785 aa, Artificial Sequence
  Description of Artificial Sequence: Synthetic polypeptide
YMLDLQPETTGGGGSGGGGSGGGGSIQRTPKIQVYSRHPAENGKSNFLNCYVSGFHPSDIEVDLLKNGERIEKVEHSDLSFSKDWSFYLLYYTEFTPTEKDEYACRVNHVTLSQPKIVKWDRDMGGGGSGGGGSGGGGSGGGGSGSHSMRYFFTSVSRPGRGEPRFIAVGYVDDTQFVRFDSDAASQRMEPRAPWIEQEGPEYWDGETRKVKAHSQTHRVDLGTLRGAYNQSEAGSHTVQRMYGCDVGSDWRFLRGYHQYAYDGKDYIALKEDLRSWTAADMAAQTTKHKWEAAHVAEQLRAYLEGTCVEWLRRYLENGKETLQRTDAPKTHMTHHAVSDHEATLRCWALSFYPAEITLTWQRDGEDQTQDTELVETRPAGDGTFQKWAAVVVPSGQEQRYTCHVQHEGLPKPLTLRWEPSSGGGGSGGGGSGGGGSIAELPPKVSVFVPPRDGFFGNPRKSKLICQATGFSPRQIQVSWLREGKQVGSGVTTDQVQAEAKESGPTTYKVTSTLTIKESDWLGQSMFTCRVDHRGLTFQQNASSMCVPDQDTAIRVFAIPPSFASIFLTKSTKLTCLVTDLTTYDSVTISWTRQNGEAVKTHTNISESHPNATFSAVGEASICEDDWNSGERFTCTVTHTDLPSPLKQTISRPKGVALHRPDVYLLPPAREQLNLRESATITCLVTGFSPADVFVQWMQRGQPLSPEKYVTSAPMPEPQAPGRYFAHSILTVSEEEWNTGETYTCVVAHEALPNRVTERTVDKSTGKPTLYNVSLVMSDTAGTCY

SEQ ID NO: 238 - protein, 784 aa, Artificial Sequence
  Description of Artificial Sequence: Synthetic polypeptide
NLVPMVATVGCGGSGGGGSGGGGSIQRTPKIQVYSRHPAENGKSNFLNCYVSGFHPSDIEVDLLKNGERIEKVEHSDLSFSKDWSFYLLYYTEFTPTEKDEYACRVNHVTLSQPKIVKWDRDMGGGGSGGGGSGGGGSGGGGSGSHSMRYFFTSVSRPGRGEPRFIAVGYVDDTQFVRFDSDAASQRMEPRAPWIEQEGPEYWDGETRKVKAHSQTHRVDLGTLRGCYNQSEAGSHTVQRMYGCDVGSDWRFLRGYHQYAYDGKDYIALKEDLRSWTAADMAAQTTKHKWEAAHVAEQLRAYLEGTCVEWLRRYLENGKETLQRTDAPKTHMTHHAVSDHEATLRCWALSFYPAEITLTWQRDGEDQTQDTELVETRPAGDGTFQKWAAVVVPSGQEQRYTCHVQHEGLPKPLTLRWEPSSGGGGSGGGGSGGGGSIAELPPKVSVFVPPRDGFFGNPRKSKLICQATGFSPRQIQVSWLREGKQVGSGVTTDQVQAEAKESGPTTYKVTSTLTIKESDWLGQSMFTCRVDHRGLTFQQNASSMCVPDQDTAIRVFAIPPSFASIFLTKSTKLTCLVTDLTTYDSVTISWTRQNGEAVKTHTNISESHPNATFSAVGEASICEDDWNSGERFTCTVTHTDLPSPLKQTISRPKGVALHRPDVYLLPPAREQLNLRESATITCLVTGFSPADVFVQWMQRGQPLSPEKYVTSAPMPEPQAPGRYFAHSILTVSEEEWNTGETYTCVVAHEALPNRVTERTVDKSTGKPTLYNVSLVMSDTAGTCY

SEQ ID NO: 239 - protein, 785 aa, Artificial Sequence
  Description of Artificial Sequence: Synthetic polypeptide
ELAGIGILTVGCGGSGGGGSGGGGSIQRTPKIQVYSRHPAENGKSNFLNCYVSGFHPSDIEVDLLKNGERIEKVEHSDLSFSKDWSFYLLYYTEFTPTEKDEYACRVNHVTLSQPKIVKWDRDMGGGGSGGGGSGGGGSGGGGSGSHSMRYFFTSVSRPGRGEPRFIAVGYVDDTQFVRFDSDAASQRMEPRAPWIEQEGPEYWDGETRKVKAHSQTHRVDLGTLRGCYNQSEAGSHTVQRMYGCDVGSDWRFLRGYHQYAYDGKDYIALKEDLRSWTAADMAAQTTKHKWEAAHVAEQLRAYLEGTCVEWLRRYLENGKETLQRTDAPKTHMTHHAVSDHEATLRCWALSFYPAEITLTWQRDGEDQTQDTELVETRPAGDGTFQKWAAVVVPSGQEQRYTCHVQHEGLPKPLTLRWEPSSGGGGSGGGGSGGGGSIAELPPKVSVFVPPRDGFFGNPRKSKLICQATGFSPRQIQVSWLREGKQVGSGVTTDQVQAEAKESGPTTYKVTSTLTIKESDWLGQSMFTCRVDHRGLTFQQNASSMCVPDQDTAIRVFAIPPSFASIFLTKSTKLTCLVTDLTTYDSVTISWTRQNGEAVKTHTNISESHPNATFSAVGEASICEDDWNSGERFTCTVTHTDLPSPLKQTISRPKGVALHRPDVYLLPPAREQLNLRESATITCLVTGFSPADVFVQWMQRGQPLSPEKYVTSAPMPEPQAPGRYFAHSILTVSEEEWNTGETYTCVVAHEALPNRVTERTVDKSTGKPTLYNVSLVMSDTAGTCY

SEQ ID NO: 240 - protein, 784 aa, Artificial Sequence
  Description of Artificial Sequence: Synthetic polypeptide
ALWEIQQVVGCGGSGGGGSGGGGSIQRTPKIQVYSRHPAENGKSNFLNCYVSGFHPSDIEVDLLKNGERIEKVEHSDLSFSKDWSFYLLYYTEFTPTEKDEYACRVNHVTLSQPKIVKWDRDMGGGGSGGGGSGGGGSGGGGSGSHSMRYFFTSVSRPGRGEPRFIAVGYVDDTQFVRFDSDAASQRMEPRAPWIEQEGPEYWDGETRKVKAHSQTHRVDLGTLRGCYNQSEAGSHTVQRMYGCDVGSDWRFLRGYHQYAYDGKDYIALKEDLRSWTAADMAAQTTKHKWEAAHVAEQLRAYLEGTCVEWLRRYLENGKETLQRTDAPKTHMTHHAVSDHEATLRCWALSFYPAEITLTWQRDGEDQTQDTELVETRPAGDGTFQKWAAVVVPSGQEQRYTCHVQHEGLPKPLTLRWEPSSGGGGSGGGGSGGGGSIAELPPKVSVFVPPRDGFFGNPRKSKLICQATGFSPRQIQVSWLREGKQVGSGVTTDQVQAEAKESGPTTYKVTSTLTIKESDWLGQSMFTCRVDHRGLTFQQNASSMCVPDQDTAIRVFAIPPSFASIFLTKSTKLTCLVTDLTTYDSVTISWTRQNGEAVKTHTNISESHPNATFSAVGEASICEDDWNSGERFTCTVTHTDLPSPLKQTISRPKGVALHRPDVYLLPPAREQLNLRESATITCLVTGFSPADVFVQWMQRGQPLSPEKYVTSAPMPEPQAPGRYFAHSILTVSEEEWNTGETYTCVVAHEALPNRVTERTVDKSTGKPTLYNVSLVMSDTAGTCY

SEQ ID NO: 241 - protein, 784 aa, Artificial Sequence
  Description of Artificial Sequence: Synthetic polypeptide
KLWAQCVQLGCGGSGGGGSGGGGSIQRTPKIQVYSRHPAENGKSNFLNCYVSGFHPSDIEVDLLKNGERIEKVEHSDLSFSKDWSFYLLYYTEFTPTEKDEYACRVNHVTLSQPKIVKWDRDMGGGGSGGGGSGGGGSGGGGSGSHSMRYFFTSVSRPGRGEPRFIAVGYVDDTQFVRFDSDAASQRMEPRAPWIEQEGPEYWDGETRKVKAHSQTHRVDLGTLRGCYNQSEAGSHTVQRMYGCDVGSDWRFLRGYHQYAYDGKDYIALKEDLRSWTAADMAAQTTKHKWEAAHVAEQLRAYLEGTCVEWLRRYLENGKETLQRTDAPKTHMTHHAVSDHEATLRCWALSFYPAEITLTWQRDGEDQTQDTELVETRPAGDGTFQKWAAVVVPSGQEQRYTCHVQHEGLPKPLTLRWEPSSGGGGSGGGGSGGGGSIAELPPKVSVFVPPRDGFFGNPRKSKLICQATGFSPRQIQVSWLREGKQVGSGVTTDQVQAEAKESGPTTYKVTSTLTIKESDWLGQSMFTCRVDHRGLTFQQNASSMCVPDQDTAIRVFAIPPSFASIFLTKSTKLTCLVTDLTTYDSVTISWTRQNGEAVKTHTNISESHPNATFSAVGEASICEDDWNSGERFTCTVTHTDLPSPLKQTISRPKGVALHRPDVYLLPPAREQLNLRESATITCLVTGFSPADVFVQWMQRGQPLSPEKYVTSAPMPEPQAPGRYFAHSILTVSEEEWNTGETYTCVVAHEALPNRVTERTVDKSTGKPTLYNVSLVMSDTAGTCY

SEQ ID NO: 242 - protein, 785 aa, Artificial Sequence
  Description of Artificial Sequence: Synthetic polypeptide
YMLDLQPETTGCGGSGGGGSGGGGSIQRTPKIQVYSRHPAENGKSNFLNCYVSGFHPSDIEVDLLKNGERIEKVEHSDLSFSKDWSFYLLYYTEFTPTEKDEYACRVNHVTLSQPKIVKWDRDMGGGGSGGGGSGGGGSGGGGSGSHSMRYFFTSVSRPGRGEPRFIAVGYVDDTQFVRFDSDAASQRMEPRAPWIEQEGPEYWDGETRKVKAHSQTHRVDLGTLRGCYNQSEAGSHTVQRMYGCDVGSDWRFLRGYHQYAYDGKDYIALKEDLRSWTAADMAAQTTKHKWEAAHVAEQLRAYLEGTCVEWLRRYLENGKETLQRTDAPKTHMTHHAVSDHEATLRCWALSFYPAEITLTWQRDGEDQTQDTELVETRPAGDGTFQKWAAVVVPSGQEQRYTCHVQHEGLPKPLTLRWEPSSGGGGSGGGGSGGGGSIAELPPKVSVFVPPRDGFFGNPRKSKLICQATGFSPRQIQVSWLREGKQVGSGVTTDQVQAEAKESGPTTYKVTSTLTIKESDWLGQSMFTCRVDHRGLTFQQNASSMCVPDQDTAIRVFAIPPSFASIFLTKSTKLTCLVTDLTTYDSVTISWTRQNGEAVKTHTNISESHPNATFSAVGEASICEDDWNSGERFTCTVTHTDLPSPLKQTISRPKGVALHRPDVYLLPPAREQLNLRESATITCLVTGFSPADVFVQWMQRGQPLSPEKYVTSAPMPEPQAPGRYFAHSILTVSEEEWNTGETYTCVVAHEALPNRVTERTVDKSTGKPTLYNVSLVMSDTAGTCY

SEQ ID NO: 243 - protein, 448 aa, Artificial Sequence
  Description of Artificial Sequence: Synthetic polypeptide
ELAGIGILTVGGGGSGGGGSGGGGSIQRTPKIQVYSRHPAENGKSNFLNCYVSGFHPSDIEVDLLKNGERIEKVEHSDLSFSKDWSFYLLYYTEFTPTEKDEYACRVNHVTLSQPKIVKWDRDMGGGGSGGGGSGGGGSGGGGSGSHSMRYFFTSVSRPGRGEPRFIAVGYVDDTQFVRFDSDAASQRMEPRAPWIEQEGPEYWDGETRKVKAHSQTHRVDLGTLRGAYNQSEAGSHTVQRMYGCDVGSDWRFLRGYHQYAYDGKDYIALKEDLRSWTAADMAAQTTKHKWEAAHVAEQLRAYLEGTCVEWLRRYLENGKETLQRTDAPKTHMTHHAVSDHEATLRCWALSFYPAEITLTWQRDGEDQTQDTELVETRPAGDGTFQKWAAVVVPSGQEQRYTCHVQHEGLPKPLTLRWEPSSGSGSAGGSGSGGGSLPETGGHHHHHH

SEQ ID NO: 244 - protein, 363 aa, Artificial Sequence
  Description of Artificial Sequence: Synthetic polypeptide
GGGGSGGGGSGGGGSIAELPPKVSVFVPPRDGFFGNPRKSKLICQATGFSPRQIQVSWLREGKQVGSGVTTDQVQAEAKESGPTTYKVTSTLTIKESDWLGQSMFTCRVDHRGLTFQQNASSMCVPDQDTAIRVFAIPPSFASIFLTKSTKLTCLVTDLTTYDSVTISWTRQNGEAVKTHTNISESHPNATFSAVGEASICEDDWNSGERFTCTVTHTDLPSPLKQTISRPKGVALHRPDVYLLPPAREQLNLRESATITCLVTGFSPADVFVQWMQRGQPLSPEKYVTSAPMPEPQAPGRYFAHSILTVSEEEWNTGETYTCVVAHEALPNRVTERTVDKSTGKPTLYNVSLVMSDTAGTCY

SEQ ID NO: 245 - protein, 408 aa, Artificial Sequence
  Description of Artificial Sequence: Synthetic polypeptide
FTVTVPKDLYVVEYGSNMTIECKFPVEKQLDLAALIVYWEMEDKNIIQFVHGEEDLKVQHSSYRQRARLLKDQLSLGNAALQITDVKLQDAGVYRCMISYGGADYKRITVKVNAPYNKINQRILVVDPVTSEHELTCQAEGYPKAEVIWTSSDHQVLSGKTTTTNSKREEKLFNVTSTLRINTTTNEIFYCTFRRLDPEENHTAELVIPELPLAHPPNERGGGGSGGGGSGGGGSGGGGSGGGGSQEDERIVLVDNKCKCARITSRIIRSSEDPNEDIVERNIRIIVPLNNRENISDPTSPLRTRFVYHLSDLCKKCDPTEVELDNQIVTATQSNICDEDSATETCYTYDRNKCYTAVVPLVYGGETKMVETALTPDACYPDGGGGSGGGGSDYKDDDDKHHHHHHHH

SEQ ID NO: 246 - protein, 302 aa, Artificial Sequence
  Description of Artificial Sequence: Synthetic polypeptide
FTVTVPKDLYVVEYGSNMTIECKFPVEKQLDLAALIVYWEMEDKNIIQFVHGEEDLKVQHSSYRQRARLLKDQLSLGNAALQITDVKLQDAGVYRCMISYGGADYKRITVKVNAGGGGSGGGGSGGGGSGGGGSGGGGSQEDERIVLVDNKCKCARITSRIIRSSEDPNEDIVERNIRIIVPLNNRENISDPTSPLRTRFVYHLSDLCKKCDPTEVELDNQIVTATQSNICDEDSATETCYTYDRNKCYTAVVPLVYGGETKMVETALTPDACYPDGGGGSGGGGSDYKDDDDKHHHHHHHH

SEQ ID NO: 247 - protein, 418 aa, Artificial Sequence
  Description of Artificial Sequence: Synthetic polypeptide
QVQLQQSGAELARPGASVKMSCKASGYTFTRYTMHWVKQRPGQGLEWIGYINPSRGYTNYNQKFKDKATLTTDKSSSTAYMQLSSLTSEDSAVYYCARYYDDHYSLDYWGQGTTLTVSSGGGGSGGGGSGGGGSQIVLTQSPAIMSASPGEKVTMTCSASSSVSYMNWYQQKSGTSPKRWIYDTSKLASGVPAHFRGSGSGTSYSLTISGMEAEDAATYYCQQWSSNPFTFGSGTKLEIKGGGGSGGGGSGGGGSQEDERIVLVDNKCKCARITSRIIRSSEDPNEDIVERNIRIIVPLNNRENISDPTSPLRTRFVYHLSDLCKKCDPTEVELDNQIVTATQSNICDEDSATETCYTYDRNKCYTAVVPLVYGGETKMVETALTPDACYPDGGGGSGGGGSDYKDDDDKHHHHHHHH

SEQ ID NO: 248 - protein, 676 aa, Artificial Sequence
  Description of Artificial Sequence: Synthetic polypeptide
NLVPMVATVGGGGSGGGGSGGGGSIQRTPKIQVYSRHPAENGKSNFLNCYVSGFHPSDIEVDLLKNGERIEKVEHSDLSFSKDWSFYLLYYTEFTPTEKDEYACRVNHVTLSQPKIVKWDRDMGGGGSGGGGSGGGGSGGGGSGSHSMRYFFTSVSRPGRGEPRFIAVGYVDDTQFVRFDSDAASQRMEPRAPWIEQEGPEYWDGETRKVKAHSQTHRVDLGTLRGAYNQSEAGSHTVQRMYGCDVGSDWRFLRGYHQYAYDGKDYIALKEDLRSWTAADMAAQTTKHKWEAAHVAEQLRAYLEGTCVEWLRRYLENGKETLQRTDAPKTHMTHHAVSDHEATLRCWALSFYPAEITLTWQRDGEDQTQDTELVETRPAGDGTFQKWAAVVVPSGQEQRYTCHVQHEGLPKPLTLRWEPSSGGGGSGGGGSGGGGSCVPDQDTAIRVFAIPPSFASIFLTKSTKLTCLVTDLTTYDSVTISWTRQNGEAVKTHTNISESHPNATFSAVGEASICEDDWNSGERFTCTVTHTDLPSPLKQTISRPKGVALHRPDVYLLPPAREQLNLRESATITCLVTGFSPADVFVQWMQRGQPLSPEKYVTSAPMPEPQAPGRYFAHSILTVSEEEWNTGETYTCVVAHEALPNRVTERTVDKSTGKPTLYNVSLVMSDTAGTCY

SEQ ID NO: 249 - protein, 677 aa, Artificial Sequence
  Description of Artificial Sequence: Synthetic polypeptide
ELAGIGILTVGGGGSGGGGSGGGGSIQRTPKIQVYSRHPAENGKSNFLNCYVSGFHPSDIEVDLLKNGERIEKVEHSDLSFSKDWSFYLLYYTEFTPTEKDEYACRVNHVTLSQPKIVKWDRDMGGGGSGGGGSGGGGSGGGGSGSHSMRYFFTSVSRPGRGEPRFIAVGYVDDTQFVRFDSDAASQRMEPRAPWIEQEGPEYWDGETRKVKAHSQTHRVDLGTLRGAYNQSEAGSHTVQRMYGCDVGSDWRFLRGYHQYAYDGKDYIALKEDLRSWTAADMAAQTTKHKWEAAHVAEQLRAYLEGTCVEWLRRYLENGKETLQRTDAPKTHMTHHAVSDHEATLRCWALSFYPAEITLTWQRDGEDQTQDTELVETRPAGDGTFQKWAAVVVPSGQEQRYTCHVQHEGLPKPLTLRWEPSSGGGGSGGGGSGGGGSCVPDQDTAIRVFAIPPSFASIFLTKSTKLTCLVTDLTTYDSVTISWTRQNGEAVKTHTNISESHPNATFSAVGEASICEDDWNSGERFTCTVTHTDLPSPLKQTISRPKGVALHRPDVYLLPPAREQLNLRESATITCLVTGFSPADVFVQWMQRGQPLSPEKYVTSAPMPEPQAPGRYFAHSILTVSEEEWNTGETYTCVVAHEALPNRVTERTVDKSTGKPTLYNVSLVMSDTAGTCY

SEQ ID NO: 250 - protein, 240 aa, Artificial Sequence
  Description of Artificial Sequence: Synthetic polypeptide
QVQLQQSGAELARPGASVKMSCKASGYTFTRYTMHWVKQRPGQGLEWIGYINPSRGYTNYNQKFKDKATLTTDKSSSTAYMQLSSLTSEDSAVYYCARYYDDHYSLDYWGQGTTLTVSSGGGGSGGGGSGGGGSQIVLTQSPAIMSASPGEKVTMTCSASSSVSYMNWYQQKSGTSPKRWIYDTSKLASGVPAHFRGSGSGTSYSLTISGMEAEDAATYYCQQWSSNPFTFGSGTKLEIK

SEQ ID NO: 251 - protein, 163 aa, Artificial Sequence
  Description of Artificial Sequence: Synthetic polypeptide
QEDERIVLVDNKCKCARITSRIIRSSEDPNEDIVERNIRIIVPLNNRENISDPTSPLRTRFVYHLSDLCKKCDPTEVELDNQIVTATQSNICDEDSATETCYTYDRNKCYTAVVPLVYGGETKMVETALTPDACYPDGGGGSGGGGSDYKDDDDKHHHHHHHH

SEQ ID NO: 252 - protein, 392 aa, Artificial Sequence
  Description of Artificial Sequence: Synthetic polypeptide
QEDERIVLVDNKCKCARITSRIIRSSEDPNEDIVERNIRIIVPLNNRENISDPTSPLRTRFVYHLSDLCKKCDPTEVELDNQIVTATQSNICDEDSATETCYTYDRNKCYTAVVPLVYGGETKMVETALTPDACYPDGGGGSGGGGSGGGGSQVQLQQSGAELARPGASVKMSCKASGYTFTRYTMHWVKQRPGQGLEWIGYINPSRGYTNYNQKFKDKATLTTDKSSSTAYMQLSSLTSEDSAVYYCARYYDDHYSLDYWGQGTTLTVSSGGGGSGGGGSGGGGSQIVLTQSPAIMSASPGEKVTMTCSASSSVSYMNWYQQKSGTSPKRWIYDTSKLASGVPAHFRGSGSGTSYSLTISGMEAEDAATYYCQQWSSNPFTFGSGTKLEIK

SEQ ID NO: 253 - protein, 392 aa, Artificial Sequence
  Description of Artificial Sequence: Synthetic polypeptide
QVQLQQSGAELARPGASVKMSCKASGYTFTRYTMHWVKQRPGQGLEWIGYINPSRGYTNYNQKFKDKATLTTDKSSSTAYMQLSSLTSEDSAVYYCARYYDDHYSLDYWGQGTTLTVSSGGGGSGGGGSGGGGSQIVLTQSPAIMSASPGEKVTMTCSASSSVSYMNWYQQKSGTSPKRWIYDTSKLASGVPAHFRGSGSGTSYSLTISGMEAEDAATYYCQQWSSNPFTFGSGTKLEIKGGGGSGGGGSGGGGSQEDERIVLVDNKCKCARITSRIIRSSEDPNEDIVERNIRIIVPLNNRENISDPTSPLRTRFVYHLSDLCKKCDPTEVELDNQIVTATQSNICDEDSATETCYTYDRNKCYTAVVPLVYGGETKMVETALTPDACYPD

SEQ ID NO: 254 - protein, 240 aa, Artificial Sequence
  Description of Artificial Sequence: Synthetic polypeptide
CVPDQDTAIRVFAIPPSFASIFLTKSTKLTCLVTDLTTYDSVTISWTRQNGEAVKTHTNISESHPNATFSAVGEASICEDDWNSGERFTCTVTHTDLPSPLKQTISRPKGVALHRPDVYLLPPAREQLNLRESATITCLVTGFSPADVFVQWMQRGQPLSPEKYVTSAPMPEPQAPGRYFAHSILTVSEEEWNTGETYTCVVAHEALPNRVTERTVDKSTGKPTLYNVSLVMSDTAGTCY

SEQ ID NO: 255 - protein, 35 aa, Artificial Sequence
  Description of Artificial Sequence: Synthetic polypeptide
LDELQAEIEQLEERNYALRKEIEDLQKQLEKLGAP

SEQ ID NO: 256 - protein, 35 aa, Artificial Sequence
  Description of Artificial Sequence: Synthetic polypeptide
IARLEEKVKTLKAQNYELASTANMLREQVAQLGAP

SEQ ID NO: 257 - protein, 9 aa, Severe acute respiratory syndrome coronavirus 2
ALWEIQQVV

SEQ ID NO: 258 - protein, 9 aa, Severe acute respiratory syndrome coronavirus 2
KLWAQCVQL

SEQ ID NO: 259 - protein, 775 aa, Artificial Sequence
  Description of Artificial Sequence: Synthetic polypeptide
GGGGSGGGGSGGGGSIQRTPKIQVYSRHPAENGKSNFLNCYVSGFHPSDIEVDLLKNGERIEKVEHSDLSFSKDWSFYLLYYTEFTPTEKDEYACRVNHVTLSQPKIVKWDRDMGGGGSGGGGSGGGGSGGGGSGSHSMRYFFTSVSRPGRGEPRFIAVGYVDDTQFVRFDSDAASQRMEPRAPWIEQEGPEYWDGETRKVKAHSQTHRVDLGTLRGAYNQSEAGSHTVQRMYGCDVGSDWRFLRGYHQYAYDGKDYIALKEDLRSWTAADMAAQTTKHKWEAAHVAEQLRAYLEGTCVEWLRRYLENGKETLQRTDAPKTHMTHHAVSDHEATLRCWALSFYPAEITLTWQRDGEDQTQDTELVETRPAGDGTFQKWAAVVVPSGQEQRYTCHVQHEGLPKPLTLRWEPSSGGGGSGGGGSGGGGSIAELPPKVSVFVPPRDGFFGNPRKSKLICQATGFSPRQIQVSWLREGKQVGSGVTTDQVQAEAKESGPTTYKVTSTLTIKESDWLGQSMFTCRVDHRGLTFQQNASSMCVPDQDTAIRVFAIPPSFASIFLTKSTKLTCLVTDLTTYDSVTISWTRQNGEAVKTHTNISESHPNATFSAVGEASICEDDWNSGERFTCTVTHTDLPSPLKQTISRPKGVALHRPDVYLLPPAREQLNLRESATITCLVTGFSPADVFVQWMQRGQPLSPEKYVTSAPMPEPQAPGRYFAHSILTVSEEEWNTGETYTCVVAHEALPNRVTERTVDKSTGKPTLYNVSLVMSDTAGTCY

SEQ ID NO: 260 - protein, 760 aa, Artificial Sequence
  Description of Artificial Sequence: Synthetic polypeptide
GGGGSGGGGSGGGGSIQRTPKIQVYSRHPAENGKSNFLNCYVSGFHPSDIEVDLLKNGERIEKVEHSDLSFSKDWSFYLLYYTEFTPTEKDEYACRVNHVTLSQPKIVKWDRDMGGGGSGGGGSGGGGSGGGGSGSHSMRYFFTSVSRPGRGEPRFIAVGYVDDTQFVRFDSDAASQRMEPRAPWIEQEGPEYWDGETRKVKAHSQTHRVDLGTLRGAYNQSEAGSHTVQRMYGCDVGSDWRFLRGYHQYAYDGKDYIALKEDLRSWTAADMAAQTTKHKWEAAHVAEQLRAYLEGTCVEWLRRYLENGKETLQRTDAPKTHMTHHAVSDHEATLRCWALSFYPAEITLTWQRDGEDQTQDTELVETRPAGDGTFQKWAAVVVPSGQEQRYTCHVQHEGLPKPLTLRWEPSSIAELPPKVSVFVPPRDGFFGNPRKSKLICQATGFSPRQIQVSWLREGKQVGSGVTTDQVQAEAKESGPTTYKVTSTLTIKESDWLGQSMFTCRVDHRGLTFQQNASSMCVPDQDTAIRVFAIPPSFASIFLTKSTKLTCLVTDLTTYDSVTISWTRQNGEAVKTHTNISESHPNATFSAVGEASICEDDWNSGERFTCTVTHTDLPSPLKQTISRPKGVALHRPDVYLLPPAREQLNLRESATITCLVTGFSPADVFVQWMQRGQPLSPEKYVTSAPMPEPQAPGRYFAHSILTVSEEEWNTGETYTCVVAHEALPNRVTERTVDKSTGKPTLYNVSLVMSDTAGTCY

SEQ ID NO: 261 - protein, 278 aa, Homo sapiens
GSHSMRYFFTSVSRPGRGEPRFIAVGYVDDTQFVRFDSDAASRRMEPRAPWIEQEGPEYWDGETRKVKAHSQTHRVDLGTLRGYYNQSEAGSHTLQRMYGCDVGSDWRFLRGYHQYAYDGKDYIALKEDLRSWTAADMAAQTTKHKWEAAHVAEQWRAYLEGTCVEWLRRYLENGKETLQRTDAPKTHMTHHAVSDHEATLRCWALSFYPAEITLTWQRDGEDQTQDTELVETRPAGDGTFQKWAAVVVPSGQEQRYTCHVQHEGLPKPLTLRWEPSS

SEQ ID NO: 262 - protein, 278 aa, Homo sapiens
GSHSMRYFYTSVSRPGRGEPRFIAVGYVDDTQFVRFDSDAASQRMEPRAPWIEQEGPEYWDGETRKVKAHSQTHRVDLGTLRGYYNQSEAGSHTVQRMYGCDVGSDWRFLRGYHQYAYDGKDYIALKEDLRSWTAADMAAQTTKHKWEAAHVAEQLRAYLEGTCVEWLRRYLENGKETLQRTDAPKTHMTHHAVSDHEATLRCWALSFYPAEITLTWQRDGEDQTQDTELVETRPAGDGTFQKWAAVVVPSGQEQRYTCHVQHEGLPKPLTLRWEPSS

SEQ ID NO: 263 - protein, 278 aa, Homo sapiens
GSHSMRYFYTSVSRPGRGEPRFIAVGYVDDTQFVRFDSDAASQRMEPRAPWIEQEGPEYWDRNTRNVKAHSQTDRVDLGTLRGYYNQSEAGSHTIQMMYGCDVGSDGRFLRGYRQDAYDGKDYIALKEDLRSWTAADMAAQTTKHKWEAAHVAEQWRAYLEGTCVEWLRRYLENGKETLQRTDAPKTHMTHHAVSDHEATLRCWALSFYPAEITLTWQRDGEDQTQDTELVETRPAGDGTFQKWVAVVVPSGQEQRYTCHVQHEGLPKPLTLRWEPSS

SEQ ID NO: 264 - protein, 278 aa, Homo sapiens
GSHSMRYFYTAVSRPGRGEPRFIAVGYVDDTQFVQFDSDAASPRGEPRAPWVEQEGPEYWDRETQKYKRQAQTDRVSLRNLRGYYNQSEAGSHTLQRMYGCDLGPDGRLLRGYNQFAYDGKDYIALNEDLRSWTAADTAAQITQRKWEAARTAEQLRAYLEGTCVEWLRRYLENGKKTLQRAEHPKTHVTHHPVSDHEATLRCWALGFYPAEITLTWQRDGEDQTQDTELVETRPAGDGTFQKWAAVVVPSGEEQRYTCHVQHEGLPEPLTLRWGPSS

SEQ ID NO: 265 - protein, 198 aa, Homo sapiens
GDTRPRFLEQVKHECHFFNGTERVRFLDRYFYHQEEYVRFDSDVGEYRAVTELGRPDAEYWNSQKDLLEQRRAEVDTYCRHNYGVVESFTVQRRVYPEVTVYPAKTQPLQHHNLLVCSVNGFYPGSIEVRWFRNGQEEKTGVVSTGLIQNGDWTFQTLVMLETVPRSGEVYTCQVEHPSLTSPLTVEWRARSESAQSK

SEQ ID NO: 266 - protein, 198 aa, Homo sapiens
GDTRPRFLEQVKHECHFFNGTERVRFLDRYFYHQEEYVRFDSDVGEYRAVTELGRPDAEYWNSQKDLLEQRRAEVDTYCRHNYGVGESFTVQRRVYPEVTVYPAKTQPLQHHNLLVCSVNGFYPGSIEVRWFRNGQEEKTGVVSTGLIQNGDWTFQTLVMLETVPRSGEVYTCQVEHPSLTSPLTVEWRARSESAQSK

SEQ ID NO: 267 - protein, 198 aa, Homo sapiens
GDTRPRFLEYSTGECYFFNGTERVRFLDRYFYNQEEYVRFDSDVGEYRAVTELGRPDAEYWNSQKDFLEDRRALVDTYCRHNYGVGESFTVQRRVHPKVTVYPSKTQPLQHHNLLVCSVSGFYPGSIEVRWFRNGQEEKTGVVSTGLIHNGDWTFQTLVMLETVPRSGEVYTCQVEHPSVTSPLTVEWSARSESAQSK

SEQ ID NO: 268 - protein, 198 aa, Homo sapiens
GDTQPRFLKQDKFECHFFNGTERVRYLHRGIYNQEENVRFDSDVGEYRAVTELGRPVAESWNSQKDFLERRRAEVDTVCRHNYGVGESFTVQRRVHPEVTVYPAKTQPLQHHNLLVCSVSGFYPGSIEVRWFRNGQEEKAGVVSTGLIQNGDWTFQTLVMLETVPRSGEVYTCQVEHPSVMSPLTVEWRARSESAQSK

SEQ ID NO: 269 - protein, 198 aa, Homo sapiens
GDTRPRFLEYSTGECYFFNGTERVRLLERHFHNQEELLRFDSDVGEFRAVTELGRPVAESWNSQKDILEDRRAAVDTYCRHNYGAVESFTVQRRVHPKVTVYPSKTQPLQHHNLLVCSVSGFYPGSIEVRWFRNGQEEKTGVVSTGLIHNGDWTFQTLVMLETVPRSGEVYTCQVEHPSVTSPLTVEWRARSESAQSK

SEQ ID NO: 270 - protein, 198 aa, Homo sapiens
GDTRPRFLEYSTSECHFFNGTERVRFLDRYFYNQEEYVRFDSDVGEYRAVTELGRPSAEYWNSQKDILEDKRAAVDTYCRHNYGVGESFTVQRRVHPKVTVYPSKTQPLQHHNLLVCSVSGFYPGSIEVRWFRNGQEEKTGVVSTGLIHNGDWTFQTLVMLETVPRSGEVYTCQVEHPSVTSPLTVEWRARSESAQSK

SEQ ID NO: 271 - protein, 198 aa, Homo sapiens
GDTRPRFLWQPKRECHFFNGTERVRFLDRYFYNQEESVRFDSDVGEFRAVTELGRPDAEYWNSQKDILEQARAAVDTYCRHNYGVGESFTVQRRVQPKVTVYPSKTQPLQHHNLLVCSVSGFYPGSIEVRWFLNGQEEKAGMVSTGLIQNGDWTFQTLVMLETVPRSGEVYTCQVEHPSVTSPLTVEWRARSESAQSK

SEQ ID NO: 272 - protein, 198 aa, Homo sapiens
GDTRPRFLQQDKYECHFFNGTERVRFLHRDIYNQEEDLRFDSDVGEYRAVTELGRPDAEYWNSQKDFLEDRRAAVDTYCRHNYGVGESFTVQRRVEPKVTVYPARTQTLQHHNLLVCSVNGFYPGSIEVRWFRNSQEEKAGVVSTGLIQNGDWTFQTLVMLETVPRSGEVYTCQVEHPSVTSPLTVEWRAQSESAQSK

SEQ ID NO: 273 - protein, 191 aa, Homo sapiens
IKADHVSTYAAFVQTHRPTGEFMFEFDEDEMFYVDLDKKETVWHLEEFGQAFSFEAQGGLANIAILNNNLNTLIQRSNHTQATNDPPEVTVFPKEPVELGQPNTLICHIDKFFPPVLNVTWLCNGELVTEGVAESLFLPRTDYSFHKFHYLTFVPSAEDFYDCRVEHWGLDQPLLKHWEAQEPIQMPETTE

SEQ ID NO: 274 - protein, 198 aa, Homo sapiens
GRATPENYLFQGRQECYAFNGTQRFLERYIYNREEFARFDSDVGEFRAVTELGRPAAEYWNSQKDILEEKRAVPDRMCRHNYELGGPMTLQRRVQPRVNVSPSKKGPLQHHNLLVCHVTDFYPGSIQVRWFLNGQEETAGVVSTNLIRNGDWTFQILVMLEMTPQQGDVYTCQVEHTSLDSPVTVEEWKAQSDSARSK

SEQ ID NO: 275 - protein, 411 aa, Artificial Sequence
  Description of Artificial Sequence: Synthetic polypeptide
QEDERIVLVDNKCKCARITSRIIRSSEDPNEDIVERNIRIIVPLNNRENISDPTSPLRTRFVYHLSDLCKKCDPTEVELDNQIVTATQSNICDEDSATETCYTYDRNKCYTAVVPLVYGGETKMVETALTPDACYPDGGGGSGGGGSGGGGSQVQLQQSGAELARPGASVKMSCKASGYTFTRYTMHWVKQRPGQGLEWIGYINPSRGYTNYNQKFKDKATLTTDKSSSTAYMQLSSLTSEDSAVYYCARYYDDHYSLDYWGQGTTLTVSSGGGGSGGGGSGGGGSQIVLTQSPAIMSASPGEKVTMTCSASSSVSYMNWYQQKSGTSPKRWIYDTSKLASGVPAHFRGSGSGTSYSLTISGMEAEDAATYYCQQWSSNPFTFGSGTKLEIKGGGGSDYKDDDDKHHHHHH

SEQ ID NO: 276 - protein, 5 aa, Artificial Sequence
  Description of Artificial Sequence: Synthetic peptide
  See specification as filed for detailed description of substitutions and preferred embodiments
GGGGS

SEQ ID NO: 277 - protein, 25 aa, Artificial Sequence
  Description of Artificial Sequence: Synthetic peptide
GGGGSGGGGSGGGGSGGGGSGGGGS

SEQ ID NO: 278 - protein, 16 aa, Artificial Sequence
  Description of Artificial Sequence: Synthetic peptide
SGGGGSGGGGSGGGGS

SEQ ID NO: 279 - protein, 21 aa, Artificial Sequence
  Description of Artificial Sequence: Synthetic peptide
SGGGGSGGGGSGGGGSGGGGS

SEQ ID NO: 280 - protein, 4 aa, Artificial Sequence
  Description of Artificial Sequence: Synthetic peptide
GGSG

SEQ ID NO: 281 - protein, 5 aa, Artificial Sequence
  Description of Artificial Sequence: Synthetic peptide
GGGGS

SEQ ID NO: 282 - protein, 5 aa, Artificial Sequence
  Description of Artificial Sequence: Synthetic peptide
GCGGS

SEQ ID NO: 283 - protein, 5 aa, Homo sapiens
DLPSP
